(19) United States
(12) Patent Application Publication
(10) Pub. No.: US 2020/0190189 A1
(43) Pub. Date: Jun. 18, 2020

(54) ANTI-CD3-BINDING DOMAINS AND ANTIBODIES COMPRISING THEM, AND METHODS FOR THEIR GENERATION AND USE

(71) Applicant: Adimab, LLC, Lebanon, NH (US)

(72) Inventors: Laura M. Walker, Lebanon, NH (US); Robert Pejchal, Lebanon, NH (US); Eric Krauland, Lebanon, NH (US); Maximiliano Vasquez, Lebanon, NH (US); Monica Wai Ling Leung, Summit, NJ (US)

(73) Assignee: Adimab, LLC, Lebanon, NH (US)

(21) Appl. No.: 16/611,832

(22) PCT Filed: May 8, 2018
(86) PCT No.: PCT/US18/31705

§ 371 Date: Nov. 7, 2019

Related U.S. Application Data
(60) Provisional application No. 62/503,315, filed on May 8, 2017.

(51) Int. Cl. C07K 16/28

(52) U.S. Cl. CPC C07K 16/2809; C07K 2317/55; C07K 2317/31; C07K 2317/622; C07K 2317/24; C07K 2317/565; C07K 2317/73; C07K 2317/75; C07K 2317/92

(57) ABSTRACT

Anti-CD3 binding domains and antibodies comprising them, including multispecific antibodies, with, inter alia, desirable T-cell activation and (re)directed target cell killing potency and developability, profiles are provided, as well as methods for their identification, isolation, and generation, and methods for their preparation and use. Reagents for identifying, isolating, selecting, generating and characterizing CD3 binding domains and antibodies comprising them are also provided.

### CROSS REFERENCE TO RELATED APPLICATIONS

[0001] This application claims priority to U.S. Provisional Application No. 62/503,315, filed on May 8, 2017, the entire content of which is incorporated herein by reference.

### SEQUENCE LISTING

[0002] The instant application contains a Sequence Listing which has been submitted electronically in ASCII format and is hereby incorporated by reference in its entirety. Said ASCII copy, created Apr. 7, 2017, is named 2009186-0189_SL.TXT and is 2,923,505 bytes in size.

### FIELD OF THE INVENTION

[0003] The invention relates, inter alia, to anti-Cluster of Differentiation 3 (CD3)-binding domains and antibodies comprising them, including multispecific and bispecific antibodies, and functional fragments thereof, and methods and reagents for their identification, isolation, preparation, and use. Reagents for identifying, isolating, selecting, generating and characterizing CD3 binding domains and antibodies comprising them are also provided.

### BACKGROUND OF THE INVENTION

[0004] All references cited herein, including without limitation patents, patent applications, and non-patent references and publications referenced throughout are hereby expressly incorporated by reference in their entireties for all purposes.

[0005] The body's immune system serves as a defense against infection, injury and cancer. Two separate but interrelated systems, humoral and cellular immune systems, work together to protect the body. The humoral system is mediated by soluble factors, named antibodies, which neutralize products recognized as being foreign by the body. In contrast, the cellular system involves cells, such as T cells and macrophages, which remove and neutralize foreign invaders.

[0006] The activation of T cells is important for the stimulation of immune responses. T cells exhibit immunological specificity and direct most of the cellular immune responses. Although T cells do not secrete antibodies, they are required for the secretion of antibodies by B lymphocytes. T cell activation requires the participation of a number of cell surface molecules, such as the T cell receptor complex, and CD4 or CD8 molecules. The antigen-specific T cell receptor (TcR) is composed of a disulfide-linked heterodimer, membrane glycoprotein with chains, alpha and beta (α and β), or gamma and delta (γ and δ). The TcR is non-covalently linked with a complex of invariant proteins, designated CD3.

[0007] The TcR confers antigen specificity and the CD3 structures transduce activation signals to T cells. The CD3 complex contains four subunits. They can contain two zeta subunits, one epsilon subunit and either a gamma or a delta subunit. Antigen binding leads to the cross-linking and activation of the TCR complex. T-cell receptor signaling leads to T-cell activation and IL-2 production and other cytokines in a complex process.

[0008] The ligand of the TcR is the MHC-peptide complex on the surface of target cells such as virus-infected cells. After the recognition of the MHC-peptide on the target cell, T cells can have a cytotoxic or an apoptotic effect on the target cell. Especially cytotoxic T cells (CD8 positive T cells) can have advantageous effects by directly removing virus-infected cells. This arm of the cellular immune response is particularly advantageous and is important for fighting virus infections and eliminating tumor cells.

[0009] Activation of the cytotoxic T cell may occur via direct binding of the CD3 antigen without the recognition of the MHC-peptide complex by the TcR. This alternative activation route can be achieved with anti-CD3 antibodies. Non-human monoclonal antibodies have been developed against some of the CD3 chains (subunits), as exemplified by the murine antibodies OKT3, SP34, UCHT1 or 64.1. (See e.g., June, et al., J. Immunol. 136:3945-3952 (1986); Yang, et al., J. Immunol. 137:1097-1100 (1986); and Hayward, et al., Immunol. 64:87-92 (1988)). Other CD3 antibodies are disclosed, for example, in U.S. Pat. Nos. 5,585,097; 5,929,212; 5,968,509; 6,706,265; 6,750,325; 7,381,803; 7,728,114. Bispecific antibodies with CD3 binding specificity are disclosed, for example, in U.S. Pat. Nos. 7,262,276; 7,635,472; and 7,862,813.

[0010] Many of these anti-CD3 antibodies bind the epsilon chain which leads to the development of highly activated T cells. Cancer immunotherapy with ordinary monoclonal antibodies does not typically activate T-lymphocytes sufficiently so as to elicit meaningful, targeted, pharmacologic activity towards the target cell type or tissue.

[0011] The recent development and use of multispecific antibodies, such as bispecific antibodies (bsAbs), to redirect effector T cells for the targeted killing of tumor cells has shown considerable promise both pre-clinically and clinically (see, e.g., Topp et al, 2012, Blood 120:5185-87; Bargou et al, 2008, Science 321:974-77). Many of the bispecific antibodies developed to date contain a first binding site specific to CD3 for T-cell recruitment and activation, and a second binding site for a targeted disease-associated antigen, such as CD19 (Bassan, 2012, Blood 120:5094-95). The bispecific antibody is thought to bring CD3⁺ T cells into direct contact with targeted disease cells and induce cell-mediated cytotoxicity (Bassan, 2012). Anti-CD3 X anti-CD19 bispecific antibodies have been reported to produce a complete and durable molecular remission at very low concentrations in approximately 70% of adult patients with MRD⁺ ALL (Topp et al, 2012, Blood 120:5185-87). Bispecific antibodies recognizing gliomas and the CD3 epitope on T cells have been successfully used in treating brain tumors in human patients (Nitta, et al. Lancet 1990; 355:368-371). In addition, CD3 x CD20 bispecific antibodies have been produced for clinical testing (US2015/0166661 and US2017/0202194), as well as CD3 x CLL-1 (US2016/0368994).

[0012] Leukocyte redirecting bsAbs are not limited to T cells. The bispecific killer engagers (BiKEs) comprising scFvs against the NK cell antigen CD16 and a tumor-associated antigen (e.g., CD19, CD22, CD33) have also shown potent anti-cancer activity (e.g., Miller, Hematology Soc Hematol Educ Program 2013:247-53). Other alternatives include trispecific killer engagers (TriKEs), such as anti-CD16 x anti-CD19 x anti-CD22 (Miller, 2013; Gleason et al, 2012, Mol Cancer Ther 11:2674-84). An anti-CD 16 x anti-CD33 BiKE was used to treat AML and myelodysplastic syndrome (Miller, 2013; Wiernik et al, 2013, Clin Cancer Res 19:3844-55). In refractory AML, a CD16 x CD33 BiTE led to potent tumor cell killing and cytokine production by NK cells. Inhibition of ADAM 17 enhanced the CD16 x CD33 BiKE response (Miller, 2013). Other trispecific, trivalent constructs, for example against CD16/CD19/HLA-DR, have been reported (Schubert et al, 2012, mAbs 4:45-56).

[0013] Numerous methods to produce bispecific antibodies are known (see, e.g. U.S. Pat. No. 7,405,320). Bispecific antibodies can be produced by the quadroma method, which involves the fusion of two different hybridomas, each producing a monoclonal antibody recognizing a different antigenic site (Milstein and Cuello, Nature 1983; 305:537-540). The fused hybridomas are capable of synthesizing two different heavy chains and two different light chains, which can associate randomly to give a heterogeneous population of 10 different antibody structures of which only one of them, amounting to ⅛ of the total antibody molecules, will be bispecific, and therefore must be further purified from the other forms. Fused hybridomas are often less stable cytogenetically than the parent hybridomas, making the generation of a production cell line more problematic.

[0014] Another method for producing bispecific antibodies uses heterobifunctional cross-linkers to chemically tether two different monoclonal antibodies, so that the resulting hybrid conjugate will bind to two different targets (Staerz, et al. Nature 1985; 314:628-631; Perez, et al. Nature 1985; 316:354-356). Bispecific antibodies generated by this approach are essentially heteroconjugates of two IgG molecules, which diffuse slowly into tissues and are rapidly removed from the circulation. Bispecific antibodies can also be produced by reduction of each of two parental monoclonal antibodies to the respective half molecules, which are then mixed and allowed to reoxidize to obtain the hybrid structure (Staerz and Bevan. Proc Natl Acad Sci USA 1986; 83: 1453-1457). An alternative approach involves chemically cross-linking two or three separately purified Fab′ fragments using appropriate linkers. All these chemical methods are undesirable for commercial development due to high manufacturing cost, laborious production process, extensive purification steps, low yields (<20%), and heterogeneous products.

[0015] Discrete VH and VL domains of antibodies produced by recombinant DNA technology may pair with each other to form a dimer (recombinant Fv fragment) with binding capability (U.S. Pat. No. 4,642,334). However, such non-covalently associated molecules are not sufficiently stable under physiological conditions to be of practical use. Cognate VH and VL domains can be joined with a peptide linker of appropriate composition and length (usually consisting of more than 12 amino acid residues) to form a single-chain Fv (scFv) with binding activity. Methods of manufacturing scFv-based agents of multivalency and multispecificity by varying the linker length were disclosed in U.S. Pat. Nos. 5,844,094, 5,837,242 and WO 98/44001. Common problems that have been frequently associated with generating scFv-based agents of multivalency and multispecificity are low expression levels, heterogeneous products, instability in solution leading to aggregates, instability in serum, and impaired affinity.

[0016] Several bispecific antibodies targeting CD3 and CD19 are in various stages of development and/or have been approved as therapeutics. An scFv-based bispecific antibody construct, known as BITE® (Bispecific T-cell Engager), employs a single polypeptide containing 2 antigen-binding specificities, each contributed by a cognate VH and VL, linked in tandem via a flexible linker (see, e.g., Nagorsen et al, 2009, Leukemia & Lymphoma 50:886-91; Amann et al, 2009, J Immunother 32:453-64; Baeuerle and Reinhardt, 2009, Cancer Res 69:4941-44). Another bispecific antibody called DART® (Dual-Affinity Re-Targeting) utilizes a disulfide-stabilized diabody design (see, e.g., Moore et al., 2011, Blood 117:4542-51; Veri et al, 2010, Arthritis Rheum 62: 1933-43). Both BITE® and DART® exhibit fast blood clearance due to their small size (˜55 kDa), which requires frequent administration to maintain therapeutic levels of the bispecific antibodies.

[0017] SCORPION Therapeutics (Emergent Biosolutions, Inc., Seattle, Wash.) is a platform technology combining two antigen-binding domains in a single chain protein. One binding domain is on the C-terminus and a second binding domain on the N-terminus of an effector domain base on immunoglobulin Fc regions.

[0018] Tetravalent and bispecific antibody-like proteins are DVD-Igs which are engineered from two monoclonal antibodies (Wu, C. et al., Nature Biotechnology, 25, p 1290-1297, 2007). To construct the DVD-Ig molecule, the V domains of the two mAbs are fused in tandem by a short linker (TVAAP) (SEQ ID NO: 6714) with the variable domain of the first antibody light (VL) chain at the N terminus, followed by the other antibodies VL and Ck to form the DVD-Ig protein light chain. Similarly, the variable regions of the heavy (VH) chain of the two mAbs are fused in tandem by a short linker (ASTKGP) (SEQ ID NO: 6715) with the first antibody at the N terminus, followed by the other antibody and the heavy chain constant domains to form the DVD-Ig protein heavy chain (VH1/VL1). All light chain and heavy chain constant domains are preserved in the DVD-Ig design, as they are critical for the formation of a disulfide-linked full IgG-like molecule. Cotransfection of mammalian cells with expression vectors encoding the DVD-Ig light chain and heavy chain leads to the secretion of a single species of an IgG-like molecule with molecular weight of approximately 200 kDa. This molecule has now four binding sites, 2 from each mAb.

[0019] Bispecific antibodies have shown considerable benefits over monospecific antibodies for the treatment and the detection of cancer. Broad commercial application of bispecific antibodies has been hampered by the lack of efficient/low-cost production methods, the lack of stability of bispecific polypeptides and the lack of long half-lives in humans. A large variety of methods have been developed over the last decades to produce bispecific monoclonal antibodies (BsMAB).

[0020] However, although many candidate clinical and therapeutic antibodies have been found in early discovery efforts which display exquisite selectivity and high potency towards numerous targets of interest, a large proportion of these antibodies have nonetheless subsequently been discovered through downstream development and clinical efficacy activities to suffer from undesirable characteristics such as: promiscuity of binding, polyspecific binding (also termed herein and throughout, “polyspecificity”), off-target binding; nonspecific binding; poor expression levels or profiles in eukaryotic host cells, such as mammalian host cells and yeast cells; poor chemical and physical properties, such as poor stability during storage (e.g., poor/low “shelf-life” stability), poor (low) solubility, poor (high) viscosity, propensity to aggregate, and the like; and poor clinical and biophysical profiles, such as poor pharmacokinetic profiles, poor pharmacodynamic profiles, fast or poor in vivo clearance rates, short circulation half-life, and the like; thereby requiring the termination of further therapeutic development of such candidate antibodies. Additionally, it has been observed that antibodies derived from display technologies represent a historical minority of all clinical and marketed antibodies, a trend which is believed by many to be due, at least in part, to promiscuity of binding, poor PK profiles, and poor CMC characteristics—liabilities which are further postulated to be largely due to a lack of suitable means and methods by which undevelopable antibodies may be detected and/or counter-selected against when screening for antibodies using display technologies (see, e.g., Meninger 2012; available at hyper-text transfer protocol: proteins-congress. com/wordpress/wp-content/uploads/2012/01/Trends-in-Therapeutic-Monoclonal-Antibody-Discovery-Technology.pdf).

[0021] The art has developed certain techniques and assays to assess many of the aforementioned developability characteristics for discovered antibodies in the context of downstream development activities (“post-discovery antibodies”), such as CIC, SIC, BVP-ELISA, TMA, and other assays; however, such assays are typically not amenable to their incorporation into high-throughput early polypeptide and antibody discovery platforms, such as antibody display platforms. Furthermore, assessment of these attributes typically requires milligram to gram quantities of protein, thus often imposing a de facto limitation on the number of leads that can be pragmatically considered for development, and consequently reducing the likelihood of program success. Consequently, significant resources are often expended attempting to fix poorly behaving lead candidates with few backups available in later stages of development.

[0022] In recognition of this bottleneck, considerable efforts have been made to develop assays with lower material requirements and to bring developability assessments further upstream in the development process (Esfandiary et a., 2013, Protein Eng Des Sel 26 (10): 663-670, 2013; Sathish et al., 2013, Nat Rev Drug Discov. 12(4):306-24). A number of such assays are directed at predicting antibody solubility and aggregation behavior of identified, lead candidates. Self-interaction chromatography (SIC) and cross-interaction chromatography (CIC) are column based, low-to-medium throughput assays that correlate with and thus predict antibody solubility at relatively low concentration (Ahamed et al., 2005, J Biol Chem 280(37):32090-100; Jacobs et al., Pharm Res 27:65-71, 2010; Spencer et al., Mabs 4(3)319-325, 2012). A longer retention time on such SIC or CIC columns suggests interaction with antibodies coupled to the column, and is correlated to poor solubility (Jacobs et al., 2010). Sule and co-workers reported a medium throughput gold nanoparticle assay to predict solubility at very low concentration and further broadened the assay scope to be compatible with complex cell culture media (Sule et al., Biophys J 101(7):1749-1757, 2011; Mol Pharmaceutics 10(4):1322-1331, 2013).

[0023] As mentioned above, polyspecificity is a highly undesirable property that has been linked to poor antibody pharmacokinetics (Wu et al., J Mol Biol 368:652-665, 2007; Hotzel et a., 2012, MAbs 4(6):753-760). Certain polyspecificity assays have been reported in the art to serve as medium-throughput substitutes for broad panel tissue immunohistochemistry. Wardemann and colleagues have reported an enzyme-linked immunosorbent assay (ELISA) method using LPS, Insulin, dsDNA, and ssDNA to study polyreactivity in natural antibody repertoires over the course of B-cell maturation (Wardemann et al., 2003, Science 301(5638):1374-7). Protein biochips in which a diverse set of proteins are spotted onto an array for high-throughput ELISAs are another type of screening tool. A chip with ˜400 different human proteins from Protagen (Dortmund, Germany) has been reported to compare favorably with IHC staining analysis (Lueking et a., 2008, Bio Techniques 45(4):Pi-Pv), as well as a measure of off-target binding of clinically approved TNF-alpha inhibitors (Feyen et al., Anal Bioanal Chem 391:1713-1720, 2008). More recently, Frese et al. reported on a 384-well assay that measures polyreactivity to 32 test proteins, termed Protein Panel Profiling or 3P (Frese et al., 2013, MAbs 5:2, 279-287). Using this assay, the authors showed that FDA-approved therapeutic antibodies show a highly specific profile to the 32 test proteins and apply it to screen candidates from a phage selection process. These particular polyreactivity profiling assays have not yet been correlated with downstream development issues such as solubility, expression, and stability. A recent advance in this area was reported by Hotzel et al. 2012 MAbs 4(6):753-760), in which a baculovirus particle (BVP) ELISA was shown to predict faster antibody non-target mediated clearance in vivo, while traditional biophysical properties such as Size Exclusion Chromatography retention time, Hydrophobic Interaction Chromatography elution time, Fv charge, and pI did not (Hotzel, et al., 2012 MAbs 4(6):753-760). Recently, reagents, methods, and means to assess, predict, select and enrich for developable therapeutic antibodies, and ultimately to generate and obtain developable antibodies, for example from antibody libraries, were disclosed (see, e.g., WO2014/179363).

[0024] While the CD3-targeting approach has shown considerable promise, a common side effect of certain T-cell immunostimulatory therapies is the associated production of cytokines, often leading to toxic cytokine release syndrome (CRS), also known as cytokine storm or cytokine release crisis. Because the anti-CD3 binding domain of the bispecific antibody engages all T cells, the high cytokine-producing CD4+ T cell subset is recruited. Moreover, the CD4+ T cell subset includes regulatory T cells, whose recruitment and expansion can potentially lead to immune suppression and have a negative impact on long-term tumor suppression.

[0025] Cell proliferative disorders, such as cancer, are characterized by the uncontrolled growth of cell subpopulations. They are the leading cause of death in the developed world and the second leading cause of death in developing countries, with over 12 million new cancer cases diagnosed and 7 million cancer deaths occurring each year. The National Cancer Institute estimates that greater than half a million Americans will die of cancer in 2013, accounting for nearly one out of every four deaths in the country. As the elderly population has grown, the incidence of cancer has concurrently risen, as the probability of developing cancer is more than two-fold higher after the age of seventy. Cancer care thus represents a significant and ever-increasing societal burden. There is, therefore a need for the provision for CD3 binding domains, and antibodies comprising them (including multispecific antibodies), which display desirable developability and/or CRS risk profiles and are safe and efficacious in, for example, binding specifically to CD3 expressed on T-cells, activating T-cells, (re)-directing the activated T-cells to kill target cells, and doing this with diminished risk of eliciting cytokine release syndrome (also known as cytokine storm or cytokine release crisis).

### SUMMARY OF THE INVENTION

[0026] It has now been discovered, and is disclosed herein and throughout, a large series of CD3 binding domains and antibodies comprising them, and methods of preparing and using them. Members of this large series of CD3 binding domains collectively display a broad range of desirable properties, including, e.g.; broad of affinities for CD3 epsilon; cross-reactivity towards both human CD3 (“Hu CD3”) and cynomolgus CD3 (“Cy CD3”); as well as desirable developability profiles and/or cytokine release syndrome (CRS) risk profiles, which for many of the CD3 binding domains disclosed herein are observed to be superior to the developability profiles of other anti-CD3 antibodies (e.g., I2C; SP34; 38E4; CAB21609_A01, CAB21609_B01, CAB21609_C01,CAB21609_D01 as disclosed herein as well as in Yang et al., J Immunol, Vol 137, pages 1097-1100 (Aug. 4, 1986); US 2014/008295; and WO 2015/095392).

[0027] Advantageously, the CD3 binding domains may be incorporated into essentially any antibody format, including immunoglobulin formats (e.g., IgG, IgM, IgA, IgE, and isotypes thereof), and multispecific (including bispecific) formats. Exemplary multispecific formats that are amenable for incorporation of the inventive CD3 binding domains include, e.g.: Fab-Fc-scFv (“bottle-opener”) (XENCOR), Mab-scFv (XENCOR), Mab-Fv (XENCOR), Dual scFv (XENCOR), central Fv (XENCOR), central scFv (XENCOR), one-arm central scFv (XENCOR), Fab-Fab (XENCOR), Fab-Fv (XENCOR), mAb-Fv (XENCOR), mAb-Fab (XENCOR), DART (MACROGENICS), BiTE (AMGEN/MICROMET), KiTE, common light chain-IgG (GENENTECH), TandAb (AFFIMED) Cross-Mab (ROCHE), SEED (EMD SERONO), BEAT (GLENMARK), TrioMab (TRION PHARMA/FRESENIUS BIOTECH), DuetMab (MEDIMMUNE), and others, as disclosed, e.g., in (WO 95/09917; WO 2008/119566; WO 2008/119567; WO2011/121110; WO 2010/037835; WO 2007/042261; WO 2007/110205; WO 2011/121110; WO 2012/055961; WO 2012/16067; WO 2016/086189; WO 2016/182751; WO 2015/006749; WO 2014/049003; WO 2013/177101; WO 2015/128509; U.S. Pat. No. 7,951,917; US 2009/0252729; US 2014/0348839; U.S. Pat. No. 7,183,076; Mazor et al., Mabs, Vol. 7, pages 377-389 (2015); Muda et al., Protein Engineering, Designe, & Selection, Vol. 24, pages 447-454 (2011); and Del Bano et al., Antibodies, Vol. 5, pages 1-23 (2016).

[0028] As the inventive CD3 binding domains and antibodies comprising them collectively possess a broad range of affinity for cell-surface expressed CD3 and a broad range of T-cell activation and (re)directed target cell killing potency, and are further amenable to essentially any multispecific (including bispecific) antibody format of any valency of interest, the inventive CD3 antibodies may be selected and incorporated into therapeutic molecules designed to target almost any cell type, tissue type, and physiological compartment, and thus may serve as components of therapeutic molecules designed to address almost any disease type or disease state.

[0029] In certain embodiments, the invention provides CD3 binding domains and antibodies comprising them that bind to CD3 (e.g., CD3ε and/or CD3γ).

[0030] In certain embodiments, the inventive CD3 binding domains and antibodies comprising them are provided which display an enhanced developability profile relative to other CD3 binding domains (or antibodies comprising them). In certain embodiments, the inventive CD3 binding domains and antibodies comprising them are provided which display an enhanced developability profile relative to one or more of: trastuzumab; (Herceptin®); lintuzumab; blinatumomab (Blincyto®); and Mab 364, Mab 366, Mab 367, Mab 368, Mab 369, Mab 370, or Mab 22, as provided in Table 2.

[0031] In certain embodiments, the inventive CD3 binding domains and antibodies comprising them display a developability score of: between about 0 MFI and about 500 MFI; between about 0 MFI and about 450 MFI; between about 0 MFI and about 400 MFI; between about 0 MFI and about 350 MFI; between about 0 MFI and about 300 MFI; between about 0 MFI and about 250 MFI; between about 0 MFI and about 200 MFI; between about 0 MFI and about 150 MFI; between about 0 MFI and about 100 MFI; between about 0 MFI and about 50 MFI; between about 200 MFI and 500 MFI; between about 200 MFI and about 450 MFI; between about 200 MFI and about 400 MFI; between about 200 MFI and about 350 MFI; between about 200 MFI and about 300 MFI; between about 200 MFI and about 250 MFI; between about 100 MFI and about 450 MFI; between about 100 MFI and about 400 MFI; between about 100 MFI and about 350 MFI; between about 100 MFI and about 300 MFI; between about 100 MFI and about 250 MFI; between about 100 MFI and about 200 MFI; or between about 100 MFI and about 150 MFI.

[0032] In other embodiments, the inventive CD3 binders and antibodies comprising them display a normalized developability score of between about 0.0 and about 0.6; between about 0.0 and about 0.57; between about 0.0 and about 0.55; between about 0.0 and about 0.53; between about 0.0 and about 0.51; between about 0.0 and about 0.49; between about 0.0 and about 0.47; between about 0.0 and about 0.45; between about 0.0 and about 0.43; between about 0.0 and about 0.41; between about 0.0 and about 0.39; between about 0.0 and about 0.37; between about 0.0 and about 0.35; between about 0.0 and about 0.33; between about 0.0 and about 0.31; between about 0.0 and about 0.29; between about 0.0 and about 0.27; between about 0.0 and about 0.25; between about 0.0 and about 0.23; between about 0.0 and about 0.21; between about 0.0 and about 0.19; between about 0.0 and about 0.17; between about 0.0 and about 0.15; between about 0.0 and about 0.13; between about 0.0 and about 0.11; between about 0.0 and about 0.09; between about 0.0 and about 0.07; or between about 0.0 and about 0.05.

[0033] In certain embodiments, the developability profile and/or developability score for the inventive CD3 binders and antibodies comprising them is obtained by performing a PSR assay; an SCP assay; AS-CINS; a BVP assay; an ELISA; a DSF assay; a Tm assay; a HIC assay; a CIC assay; or combinations thereof.

[0034] In other embodiments, the inventive CD3 binding domains and antibodies comprising them elicit potent T cell activation or T cell killing while displaying a decreased propensity to elicit cytokine production to levels capable of inducing cytokine release syndrome. In certain embodiments, at least one cytokine for which cytokine production levels are measured in order to assess the propensity to elicit cytokine production levels capable of inducing cytokine release syndrome is selected from the group consisting of: Interleukin 6 (IL-6); Interleukin 12 (IL-12); tumor necrosis factor alpha (TNFa); (TGFb); Interleukin 2 (IL-2); and Interferon gamma (IFNg).

[0035] In certain embodiments, the inventive CD3 binding domains and antibodies comprising them elicit T cell activation or T cell killing while displaying a decreased propensity to elicit cytokine production to levels capable of inducing cytokine release relative to that observed one or more of: trastuzumab; (Herceptin®); lintuzumab; blinatumomab (Blincyto®); and Mab 364, Mab 366, Mab 367, Mab 368, Mab 369, Mab 370, or Mab 22, as provided in Table 2. In certain embodiments, at least one cytokine for which cytokine production levels are measured in order to assess the propensity to elicit cytokine production levels capable of inducing cytokine release syndrome is selected from the group consisting of: Interleukin 6 (IL-6); Interleukin 12 (IL-12); tumor necrosis factor alpha (TNFa); (TGFb); Interleukin 2 (IL-2); and Interferon gamma (IFNg).

[0036] In certain embodiments, the inventive CD3 binding domains and antibodies comprising them display a cytokine release syndrome risk profile that is indicative of decreased risk of eliciting cytokine release syndrome (CRS). In other embodiments, the inventive CD3 binding domains and antibodies comprising them display a cytokine release syndrome risk profile that is indicative of decreased risk of eliciting cytokine release syndrome (CRS) when compared to the cytokine release syndrome risk profile assessed for one or more of: trastuzumab; (Herceptin®); lintuzumab; blinatumomab (Blincyto®); and Mab 364, Mab 366, Mab 367, Mab 368, Mab 369, Mab 370, or Mab 22, as provided in Table 2.

[0037] In certain embodiments, the invention provides an antibody comprising a CDRH3 that is: 100% identical to; at least 99% identical to; at least 98% identical to; at least 97% identical to; at least 96% identical to; at least 95% identical to; at least 94% identical to; at least 93% identical to; at least 92% identical to; at least 91% identical to; at least 90% identical to; at least 89% identical to; at least 88% identical to; at least 87% identical to; at least 86% identical to; at least 85% identical to; at least 84% identical to; at least 83% identical to; at least 82% identical to; or at least 80% identical to; a CDRH3 selected from the group consisting of the CDRH3s of Mabs 1 through 21, 23 through 222, 224 through 363, and 371 through 405 as provided in Table 2; with the proviso that the CDRH3 is not 100% identical to the CDRH3 of any of Mabs 223, 364, 365, 366, 367, 368, 369, or 370 as provided in Table 2.

[0038] In certain embodiments, the invention provides an antibody comprising a CDRH2 that is: 100% identical to; at least 99% identical to; at least 98% identical to; at least 97% identical to; at least 96% identical to; at least 95% identical to; at least 94% identical to; at least 93% identical to; at least 92% identical to; at least 91% identical to; at least 90% identical to; at least 89% identical to; at least 88% identical to; at least 87% identical to; at least 86% identical to; at least 85% identical to; at least 84% identical to; at least 83% identical to; at least 82% identical to; or at least 80% identical to; a CDRH2 selected from the group consisting of the CDRH2s of Mabs 1 through 21, 23 through 222, 224 through 363, and 371 through 405 as provided in Table 2; with the proviso that the CDRH2 is not 100% identical to the CDRH2 of any of Mabs 223, 364, 365, 366, 367, 368, 369, or 370 as provided in Table 2.

[0039] In certain embodiments, the invention provides an antibody comprising a CDRH1 that is: 100% identical to; at least 99% identical to; at least 98% identical to; at least 97% identical to; at least 96% identical to; at least 95% identical to; at least 94% identical to; at least 93% identical to; at least 92% identical to; at least 91% identical to; at least 90% identical to; at least 89% identical to; at least 88% identical to; at least 87% identical to; at least 86% identical to; at least 85% identical to; at least 84% identical to; at least 83% identical to; at least 82% identical to; or at least 80% identical to; a CDRH1 selected from the group consisting of the CDRH1s of Mabs 1 through 21, 23 through 222, 224 through 363, and 371 through 405 as provided in Table 2; with the proviso that the CDRH1 is not 100% identical to the CDRH1 of any of Mabs 223, 364, 365, 366, 367, 368, 369, or 370 as provided in Table 2.

[0040] In certain embodiments, the invention provides an antibody comprising a CDRL3 that is: 100% identical to; at least 99% identical to; at least 98% identical to; at least 97% identical to; at least 96% identical to; at least 95% identical to; at least 94% identical to; at least 93% identical to; at least 92% identical to; at least 91% identical to; at least 90% identical to; at least 89% identical to; at least 88% identical to; at least 87% identical to; at least 86% identical to; at least 85% identical to; at least 84% identical to; at least 83% identical to; at least 82% identical to; or at least 80% identical to; a CDRL3 selected from the group consisting of the CDRL3s of Mabs 1 through 21, 23 through 222, 224 through 363, and 371 through 405 as provided in Table 2; with the proviso that the CDRL3 is not 100% identical to the CDRL3 of any of Mabs 223, 364, 365, 366, 367, 368, 369, or 370 as provided in Table 2.

[0041] In certain embodiments, the invention provides an antibody comprising a CDRL2 that is: 100% identical to; at least 99% identical to; at least 98% identical to; at least 97% identical to; at least 96% identical to; at least 95% identical to; at least 94% identical to; at least 93% identical to; at least 92% identical to; at least 91% identical to; at least 90% identical to; at least 89% identical to; at least 88% identical to; at least 87% identical to; at least 86% identical to; at least 85% identical to; at least 84% identical to; at least 83% identical to; at least 82% identical to; or at least 80% identical to; a CDRL2 selected from the group consisting of the CDRL2s of Mabs 1 through 21, 23 through 222, 224 through 363, and 371 through 405 as provided in Table 2; with the proviso that the CDRL2 is not 100% identical to the CDRL2 of any of Mabs 223, 364, 365, 366, 367, 368, 369, or 370 as provided in Table 2.

[0042] In certain embodiments, the invention provides an antibody comprising a CDRL1 that is: 100% identical to; at least 99% identical to; at least 98% identical to; at least 97% identical to; at least 96% identical to; at least 95% identical to; at least 94% identical to; at least 93% identical to; at least 92% identical to; at least 91% identical to; at least 90% identical to; at least 89% identical to; at least 88% identical to; at least 87% identical to; at least 86% identical to; at least 85% identical to; at least 84% identical to; at least 83% identical to; at least 82% identical to; or at least 80% identical to; a CDRL1 selected from the group consisting of the CDRL1s of Mabs 1 through 21, 23 through 222, 224 through 363, and 371 through 405 as provided in Table 2; with the proviso that the CDRL1 is not 100% identical to the CDRL1 of any of Mabs 223, 364, 365, 366, 367, 368, 369, or 370 as provided in Table 2.

[0043] In certain embodiments, the invention provides an antibody comprising a heavy chain (HC) that is: 100% identical to; at least 99% identical to; at least 98% identical to; at least 97% identical to; at least 96% identical to; at least 95% identical to; at least 94% identical to; at least 93% identical to; at least 92% identical to; at least 91% identical to; at least 90% identical to; at least 89% identical to; at least 88% identical to; at least 87% identical to; at least 86% identical to; at least 85% identical to; at least 84% identical to; at least 83% identical to; at least 82% identical to; or at least 80% identical to; an HC selected from the group consisting of the HCs of Mabs 1 through 21, 23 through 222, 224 through 363, and 371 through 405 as provided in Table 2; with the proviso that the HC is not 100% identical to the HC of any of Mabs 223, 364, 365, 366, 367, 368, 369, or 370 as provided in Table 2.

[0044] In certain embodiments, the invention provides an antibody comprising a light chain (LC) that is: 100% identical to; at least 99% identical to; at least 98% identical to; at least 97% identical to; at least 96% identical to; at least 95% identical to; at least 94% identical to; at least 93% identical to; at least 92% identical to; at least 91% identical to; at least 90% identical to; at least 89% identical to; at least 88% identical to; at least 87% identical to; at least 86% identical to; at least 85% identical to; at least 84% identical to; at least 83% identical to; at least 82% identical to; or at least 80% identical to; an LC selected from the group consisting of the LCs of Mabs 1 through 21, 23 through 222, 224 through 363, and 371 through 405 as provided in Table 2; with the proviso that the LC is not 100% identical to the LC of any of Mabs 223, 364, 365, 366, 367, 368, 369, or 370 as provided in Table 2.

[0045] In certain embodiments, the invention provides an antibody comprising a CDRH3 that is: 100% identical to; at least 99% identical to; at least 98% identical to; at least 97% identical to; at least 96% identical to; at least 95% identical to; at least 94% identical to; at least 93% identical to; at least 92% identical to; at least 91% identical to; at least 90% identical to; at least 89% identical to; at least 88% identical to; at least 87% identical to; at least 86% identical to; at least 85% identical to; at least 84% identical to; at least 83% identical to; at least 82% identical to; or at least 80% identical to; a CDRH3 selected from the group consisting of the CDRH3s of Mabs 1 through 21, 23 through 222, 224 through 363, and 371 through 405 as provided in Table 2; a CDRH2 that is: 100% identical to; at least 99% identical to; at least 98% identical to; at least 97% identical to; at least 96% identical to; at least 95% identical to; at least 94% identical to; at least 93% identical to; at least 92% identical to; at least 91% identical to; at least 90% identical to; at least 89% identical to; at least 88% identical to; at least 87% identical to; at least 86% identical to; at least 85% identical to; at least 84% identical to; at least 83% identical to; at least 82% identical to; or at least 80% identical to; a CDRH2 selected from the group consisting of the CDRH2s of Mabs 1 through 21, 23 through 222, 224 through 363, and 371 through 405 as provided in Table 2; and a CDRH1 that is: 100% identical to; at least 99% identical to; at least 98% identical to; at least 97% identical to; at least 96% identical to; at least 95% identical to; at least 94% identical to; at least 93% identical to; at least 92% identical to; at least 91% identical to; at least 90% identical to; at least 89% identical to; at least 88% identical to; at least 87% identical to; at least 86% identical to; at least 85% identical to; at least 84% identical to; at least 83% identical to; at least 82% identical to; or at least 80% identical to; a CDRH1 selected from the group consisting of the CDRH1s of Mabs 1 through 21, 23 through 222, 224 through 363, and 371 through 405 as provided in Table 2; with the proviso that the neither the CDRH3, CDRH2, nor the CHRH1 is 100% identical to the CHRH3, CDRH2, or CDRH1, respectively, of any of Mabs 223, 364, 365, 366, 367, 368, 369, or 370 as provided in Table 2.

[0046] In certain embodiments, the invention provides an antibody comprising a CDRL3 that is: 100% identical to; at least 99% identical to; at least 98% identical to; at least 97% identical to; at least 96% identical to; at least 95% identical to; at least 94% identical to; at least 93% identical to; at least 92% identical to; at least 91% identical to; at least 90% identical to; at least 89% identical to; at least 88% identical to; at least 87% identical to; at least 86% identical to; at least 85% identical to; at least 84% identical to; at least 83% identical to; at least 82% identical to; or at least 80% identical to; a CDRL3 selected from the group consisting of the CDRL3s of Mabs 1 through 21, 23 through 222, 224 through 363, and 371 through 405 as provided in Table 2; a CDRL2 that is: 100% identical to; at least 99% identical to; at least 98% identical to; at least 97% identical to; at least 96% identical to; at least 95% identical to; at least 94% identical to; at least 93% identical to; at least 92% identical to; at least 91% identical to; at least 90% identical to; at least 89% identical to; at least 88% identical to; at least 87% identical to; at least 86% identical to; at least 85% identical to; at least 84% identical to; at least 83% identical to; at least 82% identical to; or at least 80% identical to; a CDRL2 selected from the group consisting of the CDRL2s of Mabs 1 through 21, 23 through 222, 224 through 363, and 371 through 405 as provided in Table 2; and a CDRL1 that is: 100% identical to; at least 99% identical to; at least 98% identical to; at least 97% identical to; at least 96% identical to; at least 95% identical to; at least 94% identical to; at least 93% identical to; at least 92% identical to; at least 91% identical to; at least 90% identical to; at least 89% identical to; at least 88% identical to; at least 87% identical to; at least 86% identical to; at least 85% identical to; at least 84% identical to; at least 83% identical to; at least 82% identical to; or at least 80% identical; to a CDRL1 selected from the group consisting of the CDRL1s of Mabs 1 through 21, 23 through 222, 224 through 363, and 371 through 405 as provided in Table 2; with the proviso that the neither the CDRL3, CDRL2, nor the CHRL1 is 100% identical to the CHRL3, CDRL2, or CDRL1, respectively, of any of Mabs 223, 364, 365, 366, 367, 368, 369, or 370 as provided in Table 2.

[0047] In certain embodiments, the invention provides an antibody comprising a CDRH3 that is: 100% identical to; at least 99% identical to; at least 98% identical to; at least 97% identical to; at least 96% identical to; at least 95% identical to; at least 94% identical to; at least 93% identical to; at least 92% identical to; at least 91% identical to; at least 90% identical to; at least 89% identical to; at least 88% identical to; at least 87% identical to; at least 86% identical to; at least 85% identical to; at least 84% identical to; at least 83% identical to; at least 82% identical to; or at least 80% identical to; a CDRH3 selected from the group consisting of the CDRH3s of Mabs 1 through 21, 23 through 222, 224 through 363, and 371 through 405 as provided in Table 2; a CDRH2 that is: 100% identical to; at least 99% identical to; at least 98% identical to; at least 97% identical to; at least 96% identical to; at least 95% identical to; at least 94% identical to; at least 93% identical to; at least 92% identical to; at least 91% identical to; at least 90% identical to; at least 89% identical to; at least 88% identical to; at least 87% identical to; at least 86% identical to; at least 85% identical to; at least 84% identical to; at least 83% identical to; at least 82% identical to; or at least 80% identical to; a CDRH2 selected from the group consisting of the CDRH2s of Mabs 1 through 21, 23 through 222, 224 through 363, and 371 through 405 as provided in Table 2; a CDRH1 that is: 100% identical to; at least 99% identical to; at least 98% identical to; at least 97% identical to; at least 96% identical to; at least 95% identical to; at least 94% identical to; at least 93% identical to; at least 92% identical to; at least 91% identical to; at least 90% identical to; at least 89% identical to; at least 88% identical to; at least 87% identical to; at least 86% identical to; at least 85% identical to; at least 84% identical to; at least 83% identical to; at least 82% identical to; or at least 80% identical to; a CDRH1 selected from the group consisting of the CDRH1s of Mabs 1 through 21, 23 through 222, 224 through 363, and 371 through 405 as provided in Table 2; a CDRL3 that is: 100% identical to; at least 99% identical to; at least 98% identical to; at least 97% identical to; at least 96% identical to; at least 95% identical to; at least 94% identical to; at least 93% identical to; at least 92% identical to; at least 91% identical to; at least 90% identical to; at least 89% identical to; at least 88% identical to; at least 87% identical to; at least 86% identical to; at least 85% identical to; at least 84% identical to; at least 83% identical to; at least 82% identical to; or at least 80% identical to; a CDRL3 selected from the group consisting of the CDRL3s of Mabs 1 through 21, 23 through 222, 224 through 363, and 371 through 405 as provided in Table 2; a CDRL2 that is: 100% identical to; at least 99% identical to; at least 98% identical to; at least 97% identical to; at least 96% identical to; at least 95% identical to; at least 94% identical to; at least 93% identical to; at least 92% identical to; at least 91% identical to; at least 90% identical to; at least 89% identical to; at least 88% identical to; at least 87% identical to; at least 86% identical to; at least 85% identical to; at least 84% identical to; at least 83% identical to; at least 82% identical to; or at least 80% identical to; a CDRL2 selected from the group consisting of the CDRL2s of Mabs 1 through 21, 23 through 222, 224 through 363, and 371 through 405 as provided in Table 2; and a CDRL1 that is: 100% identical to; at least 99% identical to; at least 98% identical to; at least 97% identical to; at least 96% identical to; at least 95% identical to; at least 94% identical to; at least 93% identical to; at least 92% identical to; at least 91% identical to; at least 90% identical to; at least 89% identical to; at least 88% identical to; at least 87% identical to; at least 86% identical to; at least 85% identical to; at least 84% identical to; at least 83% identical to; at least 82% identical to; or at least 80% identical to; a CDRL1 selected from the group consisting of the CDRL1s of Mabs 1 through 21, 23 through 222, 224 through 363, and 371 through 405 as provided in Table 2; with the proviso that the neither the CDRH3, CDRH2, CDRH1, CDRL3, CDHL2, nor the CHRL1 is 100% identical to the CHRH3, CDRH2, CDRH1, CDRL3, CDHL2, or the CDRL1, respectively, of any of Mabs 223, 364, 365, 366, 367, 368, 369, or 370 as provided in Table 2.

[0048] In certain embodiments, the invention provides an antibody comprising a CD3 binding domain selected from the group consisting of: the CD3 binding domains of ADI-15512; ADI-15516; and ADI-16513; as provided in Table 2.

[0049] In certain embodiments, the invention provides an antibody comprising a CD3 binding domain selected from the group consisting of: the CD3 binding domains of ADI-18562; ADI-18564; ADI-18565; ADI-18566; ADI-18567; ADI-18568; ADI-18570; ADI-18571; ADI-18572; ADI-18573; ADI-18563; ADI-18569; ADI-18574; ADI-18575; ADI-18576; ADI-18578; ADI-18579; ADI-18580; ADI-18581; ADI-18582; ADI-18584; ADI-18585; ADI-18577; ADI-18583; ADI-18588; ADI-18589; ADI-18590; ADI-18591; ADI-18593; ADI-18594; ADI-18595; ADI-18596; ADI-18597; ADI-18592; ADI-18587; ADI-18586; and; ADI-16606; as provided in Table 2.

[0050] In certain embodiments, the invention provides an antibody comprising a CD3 binding domain selected from the group consisting of: the CD3 binding domains of ADI-18576; ADI-20820; ADI-20578; ADI-20571; ADI-21097; ADI-20577; ADI-20576; ADI-20568; ADI-20582; ADI-20575; ADI-20567; ADI-20574; ADI-20573; ADI-20579; ADI-18565; ADI-20818; ADI-20587; ADI-20588; ADI-20589; ADI-20590; ADI-20594; ADI-20596; ADI-20599; ADI-20605; ADI-20607; ADI-20608; and ADI-20609; as provided in Table 2.

[0051] In certain embodiments, the invention provides an antibody comprising a CD3 binding domain selected from the group consisting of: the CD3 binding domains of ADI-16606; ADI-20587; ADI-20607; ADI-20590; ADI-28708; ADI-28709; ADI-28710; ADI-21943; ADI-28711; ADI-28712; ADI-28713; ADI-28714; ADI-28715; ADI-21944; ADI-28716; ADI-21945; ADI-21946; ADI-28717; ADI-21947; ADI-28718; ADI-28719; ADI-28720; ADI-28721; ADI-28722; ADI-28723; ADI-28724; ADI-28725; ADI-28726; ADI-28727; ADI-28728; ADI-28729; ADI-28730; ADI-28731; ADI-28732; ADI-28733; ADI-28734; ADI-28735; ADI-28736; ADI-28737; ADI-28738; ADI-28739; ADI-28740; ADI-28741; ADI-28742; ADI-28743; ADI-21948; ADI-21949; ADI-28744; ADI-21950; ADI-28745; ADI-28746; ADI-28747; ADI-28748; ADI-21951; ADI-21952; ADI-28749; ADI-28750; ADI-28751; ADI-21953; ADI-28752; ADI-21954; ADI-28753; ADI-28754; ADI-28755; ADI-28756; ADI-28757; ADI-28758; ADI-28759; ADI-28760; ADI-28761; ADI-28762; ADI-28763; ADI-28764; ADI-28765; ADI-28766; ADI-28767; ADI-28768; ADI-21955; ADI-28769; ADI-28770; ADI-21956; ADI-28771; ADI-28772; ADI-28773; ADI-28774; and ADI-28775; as provided in Table 2.

[0052] In certain embodiments, the invention provides an antibody comprising a CD3 binding domain selected from the group consisting of: the CD3 binding domains of ADI-21959; ADI-21963; ADI-21965; ADI-21967; ADI-21970; ADI-21971; ADI-21972; ADI-21973; ADI-21974; ADI-21975; ADI-21976; ADI-21977; ADI-21978; ADI-21979; ADI-21943; ADI-21944; ADI-21945; ADI-21946; ADI-21947; ADI-21948; ADI-21949; ADI-21950; ADI-21951; ADI-21952; ADI-21953; ADI-21954; ADI-21955; and ADI-21956; as provided in Table 2.

[0053] In certain embodiments, the invention provides an antibody comprising a CD3 binding domain selected from the group consisting of: the CD3 binding domains of ADI-21952; ADI-22523; ADI-24403; ADI-24404; ADI-24405; ADI-24407; ADI-24408; ADI-24409; ADI-24410; ADI-24411; ADI-24412; ADI-24413; ADI-24414; ADI-24415; ADI-24416; ADI-24417; ADI-24418; ADI-24434; ADI-24435; ADI-24436; ADI-24437; ADI-24438; ADI-24439; ADI-24440; ADI-24441; ADI-24442; ADI-24443; ADI-24444; ADI-24445; ADI-24446; ADI-24449; ADI-24388; ADI-24389; ADI-24390; ADI-24391; ADI-24392; ADI-24393; ADI-24394; ADI-24395; ADI-24396; ADI-24397; ADI-24398; ADI-24399; ADI-24400; ADI-24401; ADI-24402; ADI-24419; ADI-24420; ADI-24421; ADI-24422; ADI-24423; ADI-24424; ADI-24425; ADI-24426; ADI-24427; ADI-24428; ADI-24429; ADI-24430; ADI-24431; ADI-24432; ADI-24433; ADI-24447; and ADI-24448; as provided in Table 2.

[0054] In certain embodiments, the invention provides an antibody comprising a CD3 binding domain selected from the group consisting of: the CD3 binding domains of ADI-22523; ADI-23652; ADI-23653; ADI-23654; ADI-23655; ADI-23656; ADI-23657; ADI-23658; ADI-23651; ADI-23644; ADI-23645; ADI-23646; ADI-23647; ADI-23648; ADI-23649; ADI-23650; ADI-23667; ADI-23668; ADI-23669; ADI-23670; ADI-23671; ADI-23672; ADI-23673; ADI-23659; ADI-23660; ADI-23661; ADI-23663; ADI-23664; ADI-23639; ADI-23641; ADI-23642; ADI-23640; ADI-23643; ADI-21952; ADI-23633; ADI-23634; ADI-23635; ADI-23636; ADI-23637; ADI-23638; ADI-23632; and ADI-23629; as provided in Table 2.

[0055] In certain embodiments, the invention provides an antibody comprising a CD3 binding domain selected from the group consisting of: the CD3 binding domains of ADI-22523; ADI-26906; ADI-26907; ADI-26908; ADI-26909; ADI-26910; ADI-26912; ADI-26913; ADI-26915; ADI-26916; ADI-26917; ADI-26918; ADI-26919; ADI-26920; ADI-26921; ADI-26924; ADI-26925; ADI-26927; ADI-26928; ADI-26929; ADI-26930; ADI-26932; ADI-26933; ADI-26938; ADI-26939; ADI-26940; ADI-26941; ADI-26942; ADI-26943; ADI-26944; ADI-26945; ADI-26950; ADI-26954; ADI-23672; ADI-23673; ADI-23664; ADI-26955; ADI-26956; ADI-26957; ADI-26958; ADI-26959; ADI-26960; ADI-26962; ADI-26963; ADI-26964; ADI-26965; ADI-26966; ADI-26968; ADI-26969; ADI-26971; ADI-26972; ADI-26973; ADI-26974; ADI-26975; ADI-26976; ADI-26977; ADI-26978; ADI-26979; ADI-26980; ADI-26981; ADI-26982; ADI-26983; ADI-26984; ADI-26985; ADI-26986; ADI-26987; ADI-26988; ADI-26989; ADI-26990; ADI-26991; ADI-26992; ADI-26993; ADI-26994; and ADI-26995; as provided in Table 2.

[0056] In certain embodiments, the invention provides an antibody comprising a CD3 binding domain selected from the group consisting of: the CD3 binding domains of ADI-22523; ADI-26906; ADI-26907; ADI-26908; ADI-26910; ADI-26913; ADI-26915; ADI-26919; ADI-26920; ADI-26921; ADI-26943; ADI-26954; ADI-21952; ADI-26955; ADI-26956; ADI-26962; ADI-26978; ADI-26983; and ADI-26994; as provided in Table 2.

[0057] In certain embodiments, the invention provides an antibody comprising a CD3 binding domain selected from the group consisting of: ADI-15512; ADI-16513; ADI-15516; ADI-18565; ADI-18589; ADI-18585; ADI-18590; ADI-18576; ADI-20568; ADI-20580; ADI-21978; ADI-22523; ADI-25133; and ADI-26906.

[0058] In certain embodiments, the invention provides an antibody comprising a CD3 binding domain selected from the group consisting of: ADI-16606; ADI-29601; ADI-29602; ADI-29603; ADI-20587; ADI-20607; ADI-20590; ADI-21952; ADI-23633; ADI-26955; ADI-26956; ADI-26957; ADI-26958; ADI-26959; ADI-26960; ADI-26961; ADI-26962; ADI-26963; ADI-26964; ADI-26965; ADI-26966; ADI-26967; ADI-26968; ADI-26969; ADI-26970; ADI-26971; ADI-26972; ADI-26973; ADI-26974; ADI-26975; ADI-26976; ADI-26977; ADI-26978; ADI-26979; ADI-26980; ADI-26981; ADI-26982; ADI-26983; ADI-26984; ADI-26985; ADI-26986; ADI-26987; ADI-26988; ADI-26989; ADI-26990; ADI-26991; ADI-26992; ADI-26993; and ADI-26994.

[0059] In certain embodiments either alone or in combination with other embodiments of the invention, the inventive CD3 binding domains and antibodies comprising them display a decreased propensity for degradation relative to one or more of: trastuzumab; (Herceptin®); lintuzumab; blinatumomab (Blincyto®); and Mab 364, Mab 366, Mab 367, Mab 368, Mab 369, Mab 370, or Mab 22, as provided in Table 2.

[0060] In certain embodiments either alone or in combination with other embodiments of the invention, the inventive CD3 binding domains and antibodies comprising them display a decreased CRS risk profile relative to one or more of: trastuzumab; (Herceptin®); lintuzumab; blinatumomab (Blincyto®); and Mab 364, Mab 366, Mab 367, Mab 368, Mab 369, Mab 370, or Mab 22, as provided in Table 2.

[0061] In certain embodiments either alone or in combination with other embodiments, provided are CD3 binding domains and antibodies comprising them display a decreased propensity for degradation relative to one or more of: trastuzumab; (Herceptin®); lintuzumab; blinatumomab (Blincyto®); and Mab 364, Mab 366, Mab 367, Mab 368, Mab 369, Mab 370, or Mab 22, as provided in Table 2.

[0062] In certain embodiments and/or in combination with any of the embodiments disclosed herein and throughout, provided are CD3 binding domains and antibodies comprising them that are humanized. In certain embodiments, such CD3 binding domains comprise CDRs of such other embodiments, and further comprise an acceptor human framework, e.g., a human immunoglobulin framework or a human consensus framework.

[0063] In certain embodiments and/or in combination with any of the embodiments disclosed herein and throughout provided are CD3 binding domains and antibodies comprising them comprising a VH as in any of the embodiments provided herein and throughout, and a VL as in any of the embodiments provided herein and throughout, wherein one or both of the variable domain sequences include post-translational modifications.

[0064] In a further aspect of the invention, provided are CD3 binding domains and antibodies comprising them that bind to the same epitope as a CD3 binding domain provided in the other embodiments disclosed therein and throughout.

[0065] In certain embodiments, CD3 binding domains and/or antibodies comprising them have a CD3 dissociation constant (Kd) of ≤1 μM, ≤100 nM, ≤10 nM, ≤1 nM, ≤0.1 nM, ≤0.01 nM, or ≤0.001 nM (e.g., 10⁻⁸M or less, e.g., from 10⁻⁸M to 10⁻¹³M, e.g., from 10⁻⁹M to 10⁻¹³ M).

[0066] In a further aspect of the invention, CD3 binding domains and antibodies comprising them comprise a multispecific antibody. In a further aspect of the invention, CD3 binding domains and antibodies comprising them comprise a bispecific antibody.

[0067] In a further aspect of the invention, CD3 binding domains and antibodies comprising them comprise at least a second antigen binding domain that specifically binds to an oncology target; an immune-oncology target; a neurodegenerative disease target; an autoimmune disorder target; an infectious disease target; a metabolic disease target; a cognitive disorder target; a blood-brain barrier target; or a blood disease target.

[0068] In certain embodiments, the inventive CD3 binding domains and antibodies comprising them comprise a multispecific antibody, for example, a bispecific antibody wherein the multispecific antibody comprises a second binding domain having specificity for a second antigen selected from the group consisting of: 0772P (CA125, MUC16; Genbank accession no. AF36148); adipophilin (perilipin-2, Adipose differentiation-related protein, ADRP, ADFP, MGC10598; NCBI Reference Sequence: NP-001113.2); AIM-2 (Absent In Melanoma 2, PYHIN4, Interferon-Inducible Protein AIM2; NCBI Reference Sequence: NP-004824.1); ALDH1 A1 (Aldehyde Dehydrogenase 1 Family, Member A1, ALDH1, PUMB 1, Retinaldehyde Dehydrogenase 1, ALDC, ALDH-E1, ALHDII, RALDH 1, EC 1.2.1.36, ALDH11, HEL-9, HEL-S-53e, HEL12, RALDH1, Acetaldehyde Dehydrogenase 1, Aldehyde Dehydrogenase 1, Soluble, Aldehyde Dehydrogenase, Liver Cytosolic, ALDH Class 1, Epididymis Luminal Protein 12, Epididymis Luminal Protein 9, Epididymis Secretory Sperm Binding Protein Li 53e, Retinal Dehydrogenase 1, RaIDH1, Aldehyde Dehydrogenase Family 1 Member A1, Aldehyde Dehydrogenase, Cytosolic, EC 1.2.1; NCBI Reference Sequence: NP-000680.2); alpha-actinin-4 (ACTN4, Actinin, Alpha 4, FSGS1, Focal Segmental Glomerulosclerosis 1, Non-Muscle Alpha-Actinin 4, F-Actin Cross-Linking Protein, FSGS, ACTININ-4, Actinin Alpha4 Isoform, alpha-actinin-4; NCBI Reference Sequence: NP-004915.2); alpha-fetoprotein (AFP, HPAFP, FETA, alpha-1-fetoprotein, alpha-fetoglobulin, Alpha-1-fetoprotein, Alpha-fetoglobulin, HP; GenBank: AAB58754.1); Amphiregulin (AREG, SDGF, Schwannoma-Derived Growth Factor, Colorectum Cell-Derived Growth Factor, AR, CRDGF; GenBank: AAA51781.1); ARTC1 (ART1, ADP-Ribosyltransferase 1, Mono(ADP-Ribosyl)Transferase 1, ADP-Ribosyltransferase C2 And C3 Toxin-Like 1, ART2, CD296, RT6, ADP-Ribosyltransferase 2, GPI-Linked NAD(P)(+)-Arginine ADP-Ribosyltransferase 1, EC 2.4.2.31, CD296 Antigen; NP); ASLG659; ASPHDI (Aspartate Beta-Hydroxylase Domain Containing 1, Aspartate Beta-Hydroxylase Domain-Containing Protein 1, EC 1.14.11., GenBank: AAI44153.1); B7-H4 (VTCN1, V-Set Domain Containing T Cell Activation Inhibitor 1, B7H4, B7 Superfamily Member 1, Immune Costimulatory Protein B7-H4, B7h.5, T-Cell Costimulatory Molecule B7x, B7S1, B7X, VCTN1, H4, B7 Family Member, PRO1291, B7 Family Member, H4, T Cell Costimulatory Molecule B7x, V-Set Domain-Containing T-Cell Activation Inhibitor 1, Protein B7S1; GenBank: AAZ 17406.1); BAFF-R (TNFRSF13C, Tumor Necrosis Factor Receptor Superfamily, Member 13C, BAFFR, B-Cell-Activating Factor Receptor, BAFF Receptor, BLyS Receptor 3, CVID4, BROMIX, CD268, B Cell-Activating Factor Receptor, prolixin, Tumor Necrosis Factor Receptor Superfamily Member 13C, BR3, CD268 Antigen; NCBI Reference Sequence: NP-443177.1); BAGE-1; BCLX (L); BCR-ABL fusion protein (b3a2); beta-catenin (CTNNB1, Catenin (Cadherin-Associated Protein), Beta 1, 88 kDa, CTNNB, MRD19, Catenin (Cadherin-Associated Protein), Beta 1 (88 kD), armadillo, Catenin Beta-1; GenBank: CAA61107.1); BING-4 (WDR46, WD Repeat Domain 46, C6orf11, BING4, WD Repeat-Containing Protein BING4, Chromosome 6 Open Reading Frame 11, FP221, UTP7, WD Repeat-Containing Protein 46; NP); BMPR1 B (bone morphogenetic protein receptor-type IB, Genbank accession no. NM-00120; NP); B-RAF (Brevican (BCAN, BEHAB, Genbank accession no. AF22905); Brevican (BCAN, Chondroitin Sulfate Proteoglycan 7, Brain-Enriched Hyaluronan-Binding Protein, BEHAB, CSPG7, Brevican Proteoglycan, Brevican Core Protein, Chondroitin Sulfate Proteoglycan BEHAB; GenBank: AAH27971.1); CALCA (Calcitonin-Related Polypeptide Alpha, CALC1, Calcitonin 1, calcitonin, Alpha-Type CGRP, Calcitonin Gene-Related Peptide I, CGRP-I, CGRP, CGRP1, CT, KC, Calcitonin/Calcitonin-Related Polypeptide, Alpha, katacalcin; NP); CASP-5 (CASP5, Caspase 5, Apoptosis-Related Cysteine Peptidase, Caspase 5, Apoptosis-Related Cysteine Protease, Protease ICH-3, Protease TY, ICE(rel)-111, ICE(rel)III, ICEREL-III, ICH-3, caspase-5, TY Protease, EC 3.4.22.58, ICH3, EC 3.4.22; NP); CASP-8; CD19 (CD19-B-lymphocyte antigen CD19 isoform 2 precursor, B4, CVID3 [Homo sapiens], NCBI Reference Sequence: NP-001761.3); CD20 (CD20-B-lymphocyte antigen CD20, membrane-spanning 4-domains, subfamily A, member 1, B1,Bp35,CD20,CVID5,LEU-16,MS4A2,S7; NCBI Reference Sequence: NP-690605.1); CD21 (CD21 (CR2 (Complement receptor or C3DR (C3d/Epstein Barr virus receptor) or Hs.73792 Genbank accession no. M2600); (CD22 (B-cell receptor CD22-B isoform, BL-CAM, Lyb-8, LybB, SIGLEC-2, FLJ22814, Genbank accession No. AK02646); CD22; CD33 (CD33 Molecule, CD33 Antigen (Gp67), Sialic Acid Binding Ig-Like Lectin 3, Sialic Acid-Binding Ig-Like Lectin 3, SIGLEC3, gp67, SIGLEC-3, Myeloid Cell Surface Antigen CD33, p67, Siglec-3, CD33 Antigen; GenBank: AAH28152.1); CD45; CD70 (CD70-tumor necrosis factor (ligand) superfamily, member 7; surface antigen CD70; Ki-24 antigen; CD27 ligand; CD27-L; tumor necrosis factor ligand superfamily member 7; NCBI Reference Sequence for species Homo sapiens: NP-001243.1); CD72 (CD72 (B-cell differentiation antigen CD72, Lyb-; 359 aa, μl: 8.66, MW: 40225, TM: 1 [P] Gene Chromosome: 9p13.3, Genbank accession No. NP-001773.); CD79a (CD79a (CD79A, CD79a, immunoglobulin-associated alpha, a B cell-specific protein that covalently interacts with Ig beta (CD79B) and forms a complex on the surface with Ig M molecules, transduces a signal involved in B-cell differentiation), al: 4.84, MW: 25028 TM: 2 [P] Gene Chromosome: 19q13.2, Genbank accession No. NP-001774.1); CD79b (CD79b (CD79B, CD79b, IGb (immunoglobulin-associated beta), B29, Genbank accession no. NM-000626 or 1103867); Cdc27 (Cell Division Cycle 27, DOS1430E, D17S978E, Anaphase Promoting Complex Subunit 3, Anaphase-Promoting Complex Subunit 3, ANAPC3, APC3, CDC27Hs, H-NUC, CDC27 Homolog, Cell Division Cycle 27 Homolog (S. Cerevisiae), HNUC, NUC2, Anaphase-Promoting Complex, Protein 3, Cell Division Cycle 27 Homolog, Cell Division Cycle Protein 27 Homolog, Nuc2 Homolog; GenBank: AAH11656.1); CDK4 (Cyclin-Dependent Kinase 4, Cell Division Protein Kinase 4, PSK-J3, EC 2.7.11.22, CMM3, EC 2.7.11; NCBI Reference Sequence: NP-000066.1); CDKN2A (Cyclin-Dependent Kinase Inhibitor 2A, MLM, CDKN2, MTS1, Cyclin-Dependent Kinase Inhibitor 2A (Melanoma, P16, Inhibits CDK4), Cyclin-Dependent Kinase 4 Inhibitor A, Multiple Tumor Suppressor 1, CDK4I, MTS-1, CMM2, P16, ARF, INK4, INK4A, P14, P14ARF, P16-INK4A, P16INK4, P16INK4A, P19, P19ARF, TP16, CDK4 Inhibitor P16-INK4, Cell Cycle Negative Regulator Beta, p14ARF, p16-INK4, p16-INK4a, p16INK4A, p19ARF; NP); CEA; CLL1 (CLL-1 (CLEC12A, MICL, and DCAL, encodes a member of the C-type lectin/C-type lectin-like domain (CTL/CTLD) superfamily. Members of this family share a common protein fold and have diverse functions, such as cell adhesion, cell-cell signaling, glycoprotein turnover, and roles in inflammation and immune response. The protein encoded by this gene is a negative regulator of granulocyte and monocyte function. Several alternatively spliced transcript variants of this gene have been described, but the full-length nature of some of these variants has not been determined. This gene is closely linked to other CTL/CTLD superfamily members in the natural killer gene complex region on chromosome 12p13 (Drickamer, K Curr. Opin. Struct. Biol. 9:585-90 [1999]; van Rhenen, A, et al., Blood 110:2659-66 [2007]; Chen C H, et al. Blood 107:1459-67 [2006]; Marshall A S, et al. Eur. J. Immunol. 36:2159-69 [2006]; Bakker A B, et al Cancer Res. 64:8443-50 [2004]; Marshall A S, et al J. Biol. Chem. 279:14792-80, 2004. CLL-1 has been shown to be a type II transmembrane receptor comprising a single C-type lectin-like domain (which is not predicted to bind either calcium or sugar), a stalk region, a transmembrane domain and a short cytoplasmic tail containing an ITIM motif.); CLPP (Caseinolytic Mitochondrial Matrix Peptidase Proteolytic Subunit, Endopeptidase Clp, EC 3.4.21.92, PRLTS3, ATP-Dependent Protease ClpAP (E. coli), ClpP (Caseinolytic Protease, ATP-Dependent, Proteolytic Subunit, E. coli) Homolog, ClpP Caseinolytic Peptidase, ATP-Dependent, Proteolytic Subunit Homolog (E. coli), ClpP Caseinolytic Protease, ATP-Dependent, Proteolytic Subunit Homolog (E. coli), human, Proteolytic Subunit, ATP-Dependent Protease ClpAP, Proteolytic Subunit, Human, ClpP Caseinolytic Peptidase ATP-Dependent, Proteolytic Subunit, ClpP Caseinolytic Peptidase, ATP-Dependent, Proteolytic Subunit Homolog, ClpP Caseinolytic Protease, ATP-Dependent, Proteolytic Subunit Homolog, Putative ATP-Dependent Clp Protease Proteolytic Subunit, Mitochondrial; NP); COA-1; CPSF; CRIPTO (CRIPTO (CR, CR1, CRGF, CRIPTO, TDGF 1, teratocarcinoma-derived growth factor, Genbank accession no. NP-003203 or NM-00321); Cw6; CXCR5 CXCR5 (Burkitt's lymphoma receptor 1, a G protein-coupled receptor that is activated by the CXCL13 chemokine, functions in lymphocyte migration and humoral defense, plays a role in HIV-2 infection and perhaps development of AIDS, lymphoma, myeloma, and leukemia); 372 aa, al: 8.54 MW: 41959 TM: 7 [P] Gene Chromosome: 11q23.3, Genbank accession No. NP-001707.); CXORF61 CXORF61-chromosome X open reading frame 61[Homo sapiens], NCBI Reference Sequence: NP-001017978.1); cyclin Di (CCND1, BCL1, PRAD1, D11S287E, B-Cell CLL/Lymphoma 1, B-Cell Lymphoma 1 Protein, BCL-1 Oncogene, PRAD1 Oncogene, Cyclin Dl (PRAD1: Parathyroid Adenomatosis 1), G1/S-Specific Cyclin Dl, Parathyroid Adenomatosis 1, U21B31, G1/S-Specific Cyclin-D1, BCL-1; NCBI Reference Sequence: NP-444284.1); Cyclin-A1 (CCNA1, CT146, Cyclin A1; GenBank: AAH36346.1); dek-can fusion protein; DKK1 (Dickkopf WNT Signaling Pathway Inhibitor 1, SK, hDkk-1, Dickkopf (Xenopus Laevis) Homolog 1, Dickkopf 1 Homolog (Xenopus Laevis), DKK-1, Dickkopf 1 Homolog, Dickkopf Related Protein-1, Dickkopf-1 Like, Dickkopf-Like Protein 1, Dickkopf-Related Protein 1, Dickkopf-1, Dkk-1; GenBank: AAQ89364.1); DR1 (Down-Regulator Of Transcription 1, TBP-Binding (Negative Cofactor 2), Negative Cofactor 2-Beta, TATA-Binding Protein-Associated Phosphoprotein, NC2, NC2-BETA, Protein Drl, NC2-beta, Down-Regulator Of Transcription 1; NCBI Reference Sequence: NP-001929.1); DR13 (Major Histocompatibility Complex, Class II, DR Beta 1, HLA-DR1B, DRw10, DW2.2/DR2.2, SS1, DRB1, HLA-DRB, HLA Class II Histocompatibility Antigen, DR-1 Beta Chain, Human Leucocyte Antigen DRB1, Lymphocyte Antigen DRB1, MHC Class II Antigen, MHC Class II HLA-DR Beta 1 Chain, MHC Class II HLA-DR-Beta Cell Surface Glycoprotein, MHC Class II HLA-DRw10-Beta, DR-1, DR-12, DR-13, DR-14, DR-16, DR-4, DR-5, DR-7, DR-8, DR-9, DR1, DR12, DR13, DR14, DR16, DR4, DR5, DR7, DRB, DR9, DRw11, DRw8, HLA-DRB2, Clone P2-Beta-3, MHC Class II Antigen DRB1*1, MHC Class II Antigen DRB1*10, MHC Class II Antigen DRB1*11, MHC Class II Antigen DRB1*12, MHC Class II Antigen DRB1*13, MHC Class II Antigen DRB1*14, MHC Class II Antigen DRB1*15, MHC Class II Antigen DRB1*16, MHC Class II Antigen DRB1*3, MHC Class II Antigen DRB1*4, MHC Class II Antigen DRB1*7, MHC Class II Antigen DRB1*8, MHC Class II Antigen DRB1*9; NP); E16 (E16 (LAT1, SLC7A5, Genbank accession no. NM-00348); EDAR (EDAR—tumor necrosis factor receptor superfamily member EDAR precursor, EDA-A1 receptor; downless homolog; ectodysplasin-A receptor; ectodermal dysplasia receptor; anhidrotic ectodysplasin receptor 1, DL; ECTD10A; ECTD10B; ED1R; ED3; ED5; EDA-AIR; EDA1R; EDA3; HRM1 [Homo sapiens]; NCBI Reference Sequence: NP-071731.1); EFTUD2 (Elongation Factor Tu GTP Binding Domain Containing 2, Elongation Factor Tu GTP-Binding Domain-Containing Protein 2, hSNU114, SNU114 Homolog, U5 SnRNP-Specific Protein, 116 KDa, MFDGA, KIAA0031, 116 KD, U5 SnRNP Specific Protein, 116 KDa U5 Small Nuclear Ribonucleoprotein Component, MFDM, SNRNP116, Snrp116, Snull 14, U5-116KD, SNRP116, U5-116 KDa; GenBank: AAH02360.1); EGFR (Epidermal Growth Factor Receptor, ERBB, Proto-Oncogene C-ErbB-1, Receptor Tyrosine-Protein Kinase ErbB-1, ERBB 1, HER1, EC 2.7.10.1, Epidermal Growth Factor Receptor (Avian Erythroblastic Leukemia Viral (V-Erb-B) Oncogene Homolog), Erythroblastic Leukemia Viral (V-Erb-B) Oncogene Homolog (Avian), P1G61, Avian Erythroblastic Leukemia Viral (V-Erb-B) Oncogene Homolog, Cell Growth Inhibiting Protein 40, Cell Proliferation-Inducing Protein 61, mENA, EC 2.7.10; GenBank: AAH94761.1); EGFR-G719A; EGFR-G719C; EGFR-G719S; EGFR-L858R; EGFR-L861 Q; EGFR-57681; EGFR-T790M; Elongation factor 2 (EEF2, Eukaryotic Translation Elongation Factor 2, EF2, Polypeptidyl-TRNA Translocase, EF-2, SCA26, EEF-2; NCBI Reference Sequence: NP-001952.1); ENAH (hMena) (Enabled Homolog (Drosophila), MENA, Mammalian Enabled, ENA, NDPP1, Protein Enabled Homolog; GenBank: AAH95481.1)-results for just “ENAH” not “ENAH (hMena)”; EpCAM (Epithelial Cell Adhesion Molecule, M4S1, MIC 18, Tumor-Associated Calcium Signal Transducer 1, TACSTD1, TROP1, Adenocarcinoma-Associated Antigen, Cell Surface Glycoprotein Trop-1, Epithelial Glycoprotein 314, Major Gastrointestinal Tumor-Associated Protein GA733-2, EGP314, KSA, DIAR5, HNPCC8, Antigen Identified By Monoclonal Antibody AUA1, EGP-2, EGP40, ESA, KS 1/4, MK-1, Human Epithelial Glycoprotein-2, Membrane Component, Chromosome 4, Surface Marker (35 kD Glycoprotein), EGP, Ep-CAM, GA733-2, M1S2, CD326 Antigen, Epithelial Cell Surface Antigen, hEGP314, KS 1/4 Antigen, ACSTD1; GenBank: AAH14785.1); EphA3 (EPH Receptor A3, ETK1, ETK, TYRO4, HEK, Eph-Like Tyrosine Kinase 1, Tyrosine-Protein Kinase Receptor ETK1, EK4, EPH-Like Kinase 4, EC 2.7.10.1, EPHA3, HEK4, Ephrin Type-A Receptor 3, Human Embryo Kinase 1, TYRO4 Protein Tyrosine Kinase, hEK4, Human Embryo Kinase, Tyrosine-Protein Kinase TYRO4, EC 2.7.10; GenBank: AAH63282.1); EphB2R; Epiregulin (EREG, ER, proepiregulin; GenBank: AAI36405.1); ETBR (EDNRB, Endothelin Receptor Type B, HSCR2, HSCR, Endothelin Receptor Non-Selective Type, ET-B, ET-BR, ETRB, ABCDS, WS4A, ETB, Endothelin B Receptor; NP); ETV6-AML1 fusion protein; EZH2 (Enhancer Of Zeste Homolog 2 (Drosophila), Lysine N-Methyltransferase 6, ENX-1, KMT6 EC 2.1.1.43, EZH1, WVS, Enhancer Of Zeste (Drosophila) Homolog 2, ENX1, EZH2b, KMT6A, WVS2, Histone-Lysine N-Methyltransferase EZH2, Enhancer Of Zeste Homolog 2, EC 2.1.1; GenBank: AAH10858.1); FcRH1 (FCRL1, Fc Receptor-Like 1, FCRH1, Fc Receptor Homolog 1, FcR-Like Protein 1, Immune Receptor Translocation-Associated Protein 5, IFGP1, IRTA5, hIFGP1, IFGP Family Protein 1, CD307a, Fc Receptor-Like Protein 1, Immunoglobulin Superfamily Fc Receptor, Gp42, FcRL1, CD307a Antigen; GenBank: AAH33690.1); FcRH2 (FCRL2, Fc Receptor-Like 2, SPAP1, SH2 Domain-Containing Phosphatase Anchor Protein 1, Fc Receptor Homolog 2, FcR-Like Protein 2, Immunoglobulin Receptor Translocation-Associated Protein 4, FCRH2, IFGP4, IRTA4, IFGP Family Protein 4, SPAP1A, SPAP1 B, SPAP1C, CD307b, Fc Receptor-Like Protein 2, Immune Receptor Translocation-Associated Protein 4, Immunoglobulin Superfamily Fc Receptor, Gp42, SH2 Domain Containing Phosphatase Anchor Protein 1, FcRL2, CD307b Antigen; GenBank: AAQ88497.1); FcRH5 (FCRL5, Fc Receptor-Like 5, IRTA2, Fc Receptor Homolog 5, FcR-Like Protein 5, Immune Receptor Translocation-Associated Protein 2, BXMAS1, FCRH5, CD307, CD307e, PRO820, Fc Receptor-Like Protein 5, Immunoglobulin Superfamily Receptor Translocation Associated 2 (IRTA2), FCRL5, CD307e Antigen; GenBank: AAI01070.1); FLT3-ITD; FN1(Fibronectin 1, Cold-Insoluble Globulin, FN, Migration-Stimulating Factor, CIG, FNZ, GFND2, LETS, ED-B, FINC, GFND, MSF, fibronectin; GenBank: AAI43764.1); G250 (MN, CAIX, Carbonic Anhydrase IX, Carbonic Dehydratase, RCC-Associated Protein G250, Carbonate Dehydratase IX, Membrane Antigen MN, Renal Cell Carcinoma-Associated Antigen G250, CA-IX, P54/58N, pMW1, RCC-Associated Antigen G250, Carbonic Anhydrase 9; NP);—alias results for “G250” not “G250/MN/CAIX”; GAGE-1,2,8; GAGE-3,4,5,6,7; GDNF-Ral (GDNF family receptor alpha 1; GFRA1; GDNFR; GDNFRA; RETL1; TRNR1; RET1 L; GDNFR-alphal; GFR-ALPHA-; U95847; BC014962; NM-145793 NM-005264); GEDA (Genbank accession No. AY26076); GFRA1-GDNF family receptor alpha-1; GDNF receptor alpha-1; GDNFR-alpha-1; GFR-alpha-1; RET ligand 1; TGF-beta-related neurotrophic factor receptor 1 [Homo sapiens]; ProtKB/Swiss-Prot: P56159.2; glypican-3 (GPC3, Glypican 3, SDYS, Glypican Proteoglycan 3, Intestinal Protein OCI-5, GTR2-2, MXR7, SGBS1, DGSX, OCI-5. SGB, SGBS, Heparan Sulphate Proteoglycan, Secreted Glypican-3, OCI5; GenBank: AAH35972.1); GnTVf; gp100 (PMEL, Premelanosome Protein, SILV, D12S53E, PMEL17, SIL, Melanocyte Protein Pmel 17, Melanocytes Lineage-Specific Antigen GP100, Melanoma-Associated ME20 Antigen, Silver Locus Protein Homolog, ME20-M, ME20M, P1, P100, Silver (Mouse Homolog) Like, Silver Homolog (Mouse), ME20, SI, Melanocyte Protein Mel 17, Melanocyte Protein PMEL, Melanosomal Matrix Proteinl7, Silver, Mouse, Homolog Of; GenBank: AAC60634.1); GPC; GPNMB (Glycoprotein (Transmembrane) Nmb, Glycoprotein NMB, Glycoprotein Nmb-Like Protein, osteoactivin, Transmembrane Glycoprotein HGFIN, HGFIN, NMB, Transmembrane Glycoprotein, Transmembrane Glycoprotein NMB; GenBank: AAH32783.1); GPR172A (G protein-coupled receptor 172A; GPCR41; FLJ11856; D15Ertd747e); NP-078807.1; NM-024531.3); GPR19 (G protein-coupled receptor 19; Mm.478; NP-006134.1; NM-006143.2); GPR54 (KISS1 receptor; KISS1R; GPR54; HOT7T175; AXOR1; NP-115940.2; NM-032551.4); HAVCR1 (Hepatitis A Virus Cellular Receptor 1, T-Cell Immunoglobulin Mucin Family Member 1, Kidney Injury Molecule 1, KIM-1, KIM1, TIM, TIM-1, TIM1, TIMD-1, TIMD1, T-Cell Immunoglobulin Mucin Receptor 1, T-Cell Membrane Protein 1, HAVCR, HAVCR-1, T Cell Immunoglobin Domain And Mucin Domain Protein 1, HAVcr-1, T-Cell Immunoglobulin And Mucin Domain-Containing Protein 1; GenBank: AAH13325.1); HER2 (ERBB2, V-Erb-B2 Avian Erythroblastic Leukemia Viral Oncogene Homolog 2, NGL, NEU, Neuro/Glioblastoma Derived Oncogene Homolog, Metastatic Lymph Node Gene 19 Protein, Proto-Oncogene C-ErbB-2, Proto-Oncogene Neu, Tyrosine Kinase-Type Cell Surface Receptor HER2, MLN 19, p185erbB2, EC 2.7.10.1, V-Erb-B2 Avian Erythroblastic Leukemia Viral Oncogene Homolog 2 (Neuro/Glioblastoma Derived Oncogene Homolog), CD340, HER-2, HER-2/neu, TKR1, C-Erb B2/Neu Protein, herstatin, Neuroblastoma/Glioblastoma Derived Oncogene Homolog, Receptor Tyrosine-Protein Kinase ErbB-2, V-Erb-B2 Erythroblastic Leukemia Viral Oncogene Homolog 2, Neuro/Glioblastoma Derived Oncogene Homolog, MLN19, CD340 Antigen, EC 2.7.10; NP); HER-2/neu-alias of above; HERV-K-MEL; HLA-DOB (Beta subunit of MHC class II molecule (la antigen) that binds peptides and presents them to CD4+T lymphocytes); 273 aa, al: 6.56, MW: 30820.TM: 1 [P] Gene Chromosome: 6p21.3, Genbank accession No. NP-002111); hsp70-2 (HSPA2, Heat Shock 70 kDa Protein 2, Heat Shock 70 kD Protein 2, HSP70-3, Heat Shock-Related 70 KDa Protein 2, Heat Shock 70 KDa Protein 2; GenBank: AAD21815.1); IDO1 (Indoleamine 2,3-Dioxygenase 1, IDO, INDO, Indoleamine-Pyrrole 2,3-Dioxygenase, IDO-1, Indoleamine-Pyrrole 2,3 Dioxygenase, Indolamine 2,3 Dioxygenase, Indole 2,3 Dioxygenase, EC 1.13.11.52; NCBI Reference Sequence: NP-002155.1); IGF2B3; IL13Ralpha2 (IL13RA2, Interleukin 13 Receptor, Alpha 2, Cancer/Testis Antigen 19, Interleukin-13-Binding Protein, IL-13R-alpha-2, IL-13RA2, IL-13 Receptor Subunit Alpha-2, IL-13R Subunit Alpha-2, CD213A2, CT19, IL-13R, IL13BP, Interleukin 13 Binding Protein, Interleukin 13 Receptor Alpha 2 Chain, Interleukin-13 Receptor Subunit Alpha-2, IL13R, CD213a2 Antigen; NP); IL20Rα; Intestinal carboxyl esterase; IRTA2 (alias of FcRH5); Kallikrein 4 (KLK4, Kallikrein-Related Peptidase 4, PRSS17, EMSP1, Enamel Matrix Serine Proteinase 1, Kallikrein-Like Protein 1, Serine Protease 17, KLK-L1, PSTS, AI2A1, Kallikrein 4 (Prostase, Enamel Matrix, Prostate), ARM1, EMSP, Androgen-Regulated Message 1, Enamel Matrix Serine Protease 1, kallikrein, kallikrein-4, prostase, EC 3.4.21.-, Prostase, EC 3.4.21; GenBank: AAX30051.1); KIF20A (Kinesin Family Member 20A, RAB6KIFL, RAB6 Interacting, Kinesin-Like (Rabkinesin6), Mitotic a; LAGE-1; LDLR-fucosyltransferase AS fusion protein; Lengsin (LGSN, Lengsin, Lens Protein With Glutamine Synthetase Domain, GLULD1, Glutamate-Ammonia Ligase Domain-Containing Protein 1, LGS, Glutamate-Ammonia Ligase (Glutamine Synthetase) Domain Containing 1, Glutamate-Ammonia Ligase (Glutamine Synthase) Domain Containing 1, Lens Glutamine Synthase-Like; GenBank: AAF61255.1); LGR5 (leucine-rich repeat-containing G protein-coupled receptor 5; GPR49, GPR6; NP-003658.1; NM-003667.2; LY64 (Lymphocyte antigen 64 (RP10, type I membrane protein of the leucine rich repeat (LRR) family, regulates B-cell activation and apoptosis, loss of function is associated with increased disease activity in patients with systemic lupus erythematosis); 661 aa, al: 6.20, MW: 74147 TM: 1 [P] Gene Chromosome: 5q12, Genbank accession No. NP-005573.; Ly6E (lymphocyte antigen 6 complex, locus E; Ly67, RIG-E,SCA-2, TSA-; NP-002337.1; NM-002346.2); Ly6G6D (lymphocyte antigen 6 complex, locus G6D; Ly6-D, MEGT; NP-067079.2; NM-021246.2); LY6K (lymphocyte antigen 6 complex, locus K; LY6K; HSJ001348; FLJ3522; NP-059997.3; NM-017527.3); LyPD1-LY6/PLAUR domain containing 1, PHTS [Homo sapiens], GenBank: AAH17318.1); MAGE-A1 (Melanoma Antigen Family A, 1 (Directs Expression Of Antigen MZ2-E, MAGE1, Melanoma Antigen Family A 1, MAGEA1, Melanoma Antigen MAGE-1, Melanoma-Associated Antigen 1, Melanoma-Associated Antigen MZ2-E, Antigen MZ2-E, Cancer/Testis Antigen 1.1, CT1.1, MAGE-1 Antigen, Cancer/Testis Antigen Family 1, Member 1, Cancer/Testis Antigen Family 1, Member 1, MAGE1A; NCBI Reference Sequence: NP-004979.3); MAGE-A10 (MAGEA10, Melanoma Antigen Family A, 10, MAGE10, MAGE-10 Antigen, Melanoma-Associated Antigen 10, Cancer/Testis Antigen 1.10, CT1.10, Cancer/Testis Antigen Family 1, Member 10, Cancer/Testis Antigen Family 1, Member 10; NCBI Reference Sequence: NP-001238757.1); MAGE-A12 (MAGEA12, Melanoma Antigen Family A, 12, MAGE12, Cancer/Testis Antigen 1.12, CT1.12, MAGE12F Antigen, Cancer/Testis Antigen Family 1, Member 12, Cancer/Testis Antigen Family 1, Member 12, Melanoma-Associated Antigen 12, MAGE-12 Antigen; NCBI Reference Sequence: NP-001159859.1); MAGE-A2 (MAGEA2, Melanoma Antigen Family A, 2, MAGE2, Cancer/Testis Antigen 1.2, CT1.2, MAGEA2A, MAGE-2 Antigen, Cancer/Testis Antigen Family 1, Member 2, Cancer/Testis Antigen Family 1, Member 2, Melanoma Antigen 2, Melanoma-Associated Antigen 2; NCBI Reference Sequence: NP-001269434.1); MAGE-A3 (MAGEA3, Melanoma Antigen Family A, 3, MAGE3, MAGE-3 Antigen, Antigen MZ2-D, Melanoma-Associated Antigen 3, Cancer/Testis Antigen 1.3, CT1.3, Cancer/Testis Antigen Family 1, Member 3, HIPS, HYPD, MAGEA6, Cancer/Testis Antigen Family 1, Member 3; NCBI Reference Sequence: NP-005353.1); MAGE-A4 (MAGEA4, Melanoma Antigen Family A, 4, MAGE4, Melanoma-Associated Antigen 4, Cancer/Testis Antigen 1.4, CT1.4, MAGE-4 Antigen, MAGE-41 Antigen, MAGE-X2 Antigen, MAGE4A, MAGE4B, Cancer/Testis Antigen Family 1, Member 4, MAGE-41, MAGE-X2, Cancer/Testis Antigen Family 1, Member 4; NCBI Reference Sequence: NP-001011550.1); MAGE-A6 (MAGEA6, Melanoma Antigen Family A, 6, MAGE6, MAGE-6 Antigen, Melanoma-Associated Antigen 6, Cancer/Testis Antigen 1.6, CT1.6, MAGE3B Antigen, Cancer/Testis Antigen Family 1, Melanoma Antigen Family A 6, Member 6, MAGE-3b, MAGE3B, Cancer/Testis Antigen Family 1, Member 6; NCBI Reference Sequence: NP-787064.1); MAGE-A9 (MAGEA9, Melanoma Antigen Family A, 9, MAGE9, MAGE-9 Antigen, Melanoma-Associated Antigen 9, Cancer/Testis Antigen 1.9, CT1.9, Cancer/Testis Antigen Family 1, Member 9, Cancer/Testis Antigen Family 1, Member 9, MAGEA9A; NCBI Reference Sequence: NP-005356.1); MAGE-C1 (MAGEC1, Melanoma Antigen Family C, 1, Cancer/Testis Antigen 7.1, CT7.1, MAGE-C1 Antigen, Cancer/Testis Antigen Family 7, Member 1, CT7, Cancer/Testis Antigen Family 7, Member 1, Melanoma-Associated Antigen C1; NCBI Reference Sequence: NP-005453.2); MAGE-C2 (MAGEC2, Melanoma Antigen Family C, 2, MAGEE1, Cancer/Testis Antigen 10, CT10, HCA587, Melanoma Antigen, Family E, 1, Cancer/Testis Specific, Hepatocellular Carcinoma-Associated Antigen 587, MAGE-C2 Antigen, MAGE-E1 Antigen, Hepatocellular Cancer Antigen 587, Melanoma-Associated Antigen C2; NCBI Reference Sequence: NP-057333.1); mammaglobin-A (SCGB2A2, Secretoglobin, Family 2A, Member 2, MGB1, Mammaglobin 1, UGB2, Mammaglobin A, mammaglobin-A, Mammaglobin-1, Secretoglobin Family 2A Member 2; NP); MART2 (H HAT, Hedgehog Acyltransferase, SKI1, Melanoma Antigen Recognized By T-Cells 2, Skinny Hedgehog Protein 1, Skn, Melanoma Antigen Recognized By T Cells 2, Protein-Cysteine N-Palmitoyltransferase HHAT, EC 2.3.1.-; GenBank: AAH39071.1); M-CSF (CSF1, Colony Stimulating Factor 1 (Macrophage), MCSF, CSF-1, lanimostim, Macrophage Colony-Stimulating Factor 1, Lanimostim; GenBank: AAH21117.1); MCSP (SMCP, Sperm Mitochondria-Associated Cysteine-Rich Protein, MCS, Mitochondrial Capsule Selenoprotein, HSMCSGEN1, Sperm Mitochondrial-Associated Cysteine-Rich Protein; NCBI Reference Sequence: NP-109588.2); XAGE-lb/GAGED2a; WT1 (Wilms Tumor 1, WAGR, GUD, WIT-2, WT33, Amino-Terminal Domain Of EWS, NPHS4, Last Three Zinc Fingers Of The DNA-Binding Domain Of WT 1, AWT 1, Wilms Tumor Protein, EWS-WT1; GenBank: AAB33443.1); VEGF; Tyrosinase (TYR; OCAIA; OCA1A; tyrosinase; SHEP; NP-000363.1; NM-000372.4; GenBank: AAB60319.1); TrpM4 (BR22450, FLJ20041, TRPM4, TRPM4B, transient receptor potential cation channel, subfamily M, member 4, Genbank accession no. NM-01763); TRP2-INT2; TRP-2; TRP-1/gp75 (Tyrosinase-Related Protein 1, 5,6-Dihydroxyindole-2-Carboxylic Acid Oxidase, CAS2, CATB, TYRP, OCAS, Catalase B, b-PROTEIN, Glycoprotein 75, EC 1.14.18., Melanoma Antigen Gp75, TYRP1, TRP, TYRRP, TRP1, SHEP11, DHICA Oxidase, EC 1.14.18, GP75, EC 1.14.18.1; Triosephosphate isomerase (Triosephosphate isomerase 1, TPID, Triose-Phosphate Isomerase, HEL-S-49, TIM, Epididymis Secretory Protein Li 49, TPI, Triosephosphate Isomerase, EC 5.3.1.1; TRAG-3 (CSAG Family Member 2, Cancer/Testis Antigen Family 24, CSAG3B, Member 2, CSAG Family Member 3B, Cancer/Testis Antigen Family 24 Member 2, Cancer/Testis Antigen 24.2, Chondrosarcoma-Associated Gene 2/3 Protein, Taxol-Resistant-Associated Gene 3 Protein, Chondrosarcoma-Associated Gene 2/3 Protein-Like, CT24.2, Taxol Resistance Associated Gene 3, TRAG-3, CSAG3A, TRAG3;); TMEM46 (shisa homolog 2 (Xenopus laevis); SHISA; NP-001007539.1; NM-001007538.1; TMEM118 (ring finger protein, transmembrane2; RNFT2; FLJ1462; NP-001103373.1; NM-001109903.1; TMEFF1 (transmembrane protein with EGF-like and two follistatin-like domains 1; Tomoregulin-; H7365; C9orf2; C90RF2; U19878; X83961; NM-080655; NM-003692; TGF-betaRII (TGFBR2, Transforming Growth Factor, Beta Receptor II (70/80 kDa), TGFbeta-RII, MFS2, tbetaR-II, TGFR-2, TGF-Beta Receptor Type IIB, TGF-Beta Type II Receptor, TGF-Beta Receptor Type-2, EC 2.7.11.30, Transforming Growth Factor Beta Receptor Type IIC, AAT3, TbetaR-II, Transforming Growth Factor, Beta Receptor II (70-80 kD), TGF-Beta Receptor Type II, FAA3, Transforming Growth Factor-Beta Receptor Type II, LDS1 B, HNPCC6, LDS2B, LDS2, RITC, EC 2.7.11, TAAD2; TENB2 (TMEFF2, tomoregulin, TPEF, HPP1, TR, putative transmembrane proteoglycan, related to the EGF/heregulin family of growth factors and follistatin); 374 aa, NCBI Accession: AAD55776, AAF91397, AAG49451, NCBI RefSeq: NP-057276; NCBI Gene: 23671; OMIM: 605734; SwissProt Q9UIK5; Genbank accession No. AF179274; AY358907, CAF85723, CQ782436; TAG-2; TAG-1 (Contactin 2 (Axonal), TAG-1, AXT, Axonin-1 Cell Adhesion Molecule, TAX, Contactin 2 (transiently Expressed), TAXI, Contactin-2, Axonal Glycoprotein TAG-1, Transiently-Expressed Axonal Glycoprotein, Transient Axonal Glycoprotein, Axonin-1, TAX-1, TAG1, FAMES; PRF: 444868); SYT-SSX1 or -SSX2 fusion protein; survivin; STEAP2 (HGNC 8639, IPCA-1, PCANAP1, STAMP1, STEAP2, STMP, prostate cancer associated gene 1, prostate cancer associated protein 1, six transmembrane epithelial antigen of prostate 2, six transmembrane prostate protein, Genbank accession no. AF45513; STEAP 1 (six transmembrane epithelial antigen of prostate, Genbank accession no. NM-01244; SSX-4; SSX-2 (SSX2, Synovial Sarcoma, X Breakpoint2, X Breakpoint 2, SSX, X Breakpoint 2B, Cancer/Testis Antigen 5.2, X-Chromosome-Related 2, Tumor Antigen HOM-MEL-40, CT5.2, HD21, Cancer/Testis Antigen Family 5, HOM-MEL-40, Isoform B, Cancer/Testis Antigen Family 5 member 2a, member 2a, Protein SSX2, Sarcoma, Sarcoma, Synovial, X-Chromosome-Related 2, synovial, Synovial Sarcoma, X Breakpoint 2B, Synovial Sarcomam, SSX2A; Sp17; SOX10 (SRY (Sex Determining Region Y)-Box 10, mouse, PCWH, DOM, WS4, WS2E, WS4C, Dominant Megacolon, mouse, Human Homolog Of, Dominant Megacolon, SRY-Related HMG-Box Gene 10, Human Homolog Of, transcription Factor SOX-10; GenBank: CAG30470.1); SNRPD1 (Small Nuclear Ribonucleoprotein Dl, Small Nuclear Ribonucleoprotein Dl, Polypeptide 16 kDa, Polypeptide (16 kD), SNRPD, HsT2456, Sm-D1, SMD 1, Sm-D Autoantigen, Small Nuclear Ribonucleoprotein D1 Polypeptide 16 kDa Pseudogene, SnRNP Core Protein Dl, Small Nuclear Ribonucleoprotein Sm Dl; SLC35D3 (Solute Carrier Family 35, Member D3, FRCL1, Fringe Connection-Like Protein 1, bA55K22.3, Frc, Fringe-Like 1, Solute Carrier Family 35 Member D3; NCBI GenBank: NC-000006.11 NC-018917.2 NT-025741.16); SIRT2 (Sirtuin 2, NAD-Dependent Deacetylase Sirtuin-2, SIRL2, Silent Information Regulator 2, Regulatory Protein SIR2 Homolog 2, Sir2-Related Protein Type 2, SIR2-Like Protein 2, Sirtuin Type 2, Sirtuin (Silent Mating Type Information Regulation 2 Homolog) 2 (S. cerevisiae), Sirtuin-2, Sirtuin (Silent Mating Type Information Regulation 2, S. cerevisiae, Homolog) 2, EC 3.5.1., SIR2; GenBank: AAK51133.1); Sema 5b (FLJ10372, KIAA1445, Mm.42015, SEMA5B, SEMAG, Semaphorin 5b Hlog, sema domain, seven thrombospondin repeats (type 1 and type 1-like), Transmembrane Domain™ and short cytoplasmic domain, (semaphorin) 5B, Genbank accession no. AB04087; secernin 1 (SCRN1, SES1, KIAA0193, secerin-1; GenBank: EAL24458.1); SAGE (SAGE1, Sarcoma Antigen 1, Cancer/Testis Antigen 14, CT14, Putative Tumor Antigen; NCBI Reference Sequence: NP-061136.2); RU2AS (KAAG1, Kidney Associated Antigen 1, RU2AS, RU2 Antisense Gene Protein, Kidney-Associated Antigen 1; GenBank: AAF23613.1); RNF43-E3 ubiquitin-protein ligase RNF43 precursor [Homo sapiens], RNF 124; URCC; NCBI Reference Sequence: NP-060233.3; RhoC (RGS5 (Regulator Of G-Protein Signaling 5, MSTP032, Regulator Of G-Protein Signalling 5, MSTP092, MST092, MSTP106, MST106, MSTP129, MST129; GenBank: AAB84001.1); RET (ret proto-oncogene; MEN2A; HSCR1; MEN2B; MTC1; PTC; CDHF12; Hs.168114; RET51; RET-ELE; NP-066124.1; NM-020975.4); RBAF600 (UBR4, Ubiquitin Protein Ligase E3 Component N-Recognin 4, Zinc Finger, UBR1 Type 1, ZUBR1, E3 Ubiquitin-Protein Ligase UBR4, RBAF600, 600 KDa Retinoblastoma Protein-Associated Factor, Zinc Finger UBR1-Type Protein 1, EC 6.3.2., N-recognin-4, KIAA0462, p600, EC 6.3.2, KIAA1307; GenBank: AAL83880.1); RAGE-1 (MOK, MOK Protein Kinase, Renal Tumor Antigen, RAGE, MAPK/MAK/MRK Overlapping Kinase, Renal Tumor Antigen 1, Renal Cell Carcinoma Antigen, RAGE-1, EC 2.7.11.22, RAGE1; UniProtKB/Swiss-Prot: Q9UQ07.1); RAB38/NY-MEL-1 (RAB38, NY-MEL-1, RAB38, Member RAS Oncogene Family, Melanoma Antigen NY-MEL-1, Rab-Related GTP-Binding Protein, Ras-Related Protein Rab-38, rrGTPbp; GenBank: AAH15808.1); PTPRK (DJ480J14.2.1 (Protein Tyrosine Phosphatase, Receptor Type, K R-PTP-KAPPA, Protein Tyrosine Phosphatase Kappa, Protein Tyrosine Phosphatase Kappa), Protein Tyrosine Phosphatase, Receptor Type, K, Protein-Tyrosine Phosphatase Kappa, Protein-Tyrosine Phosphatase, Receptor Type, Kappa, R-PTP-kappa, Receptor-Type Tyrosine-Protein Phosphatase Kappa, EC 3.1.3.48, PTPK; GenBank: AAI44514.1); PSMA; PSCA hIg(2700050C12Rik, C530008016Rik, RIKEN cDNA 2700050C12, RIKEN cDNA 2700050C12 gene, Genbank accession no. AY358628); PSCA (Prostate stem cell antigen precursor, Genbank accession no. AJ29743; PRDX5 (Peroxiredoxin 5, EC 1.11.1.15, TPx Type VI, B166, Antioxidant Enzyme B166, HEL-S-55, Liver Tissue 2D-Page Spot 71 B, PMP20, Peroxisomal Antioxidant Enzyme, PRDX6, Thioredoxin Peroxidase PMP20, PRXV, AOEB 166, Epididymis Secretory Protein Li 55, Alu Co-Repressor 1, Peroxiredoxin-5, Mitochondrial, Peroxiredoxin V, prx-V, Thioredoxin Reductase, Prx-V, ACR1, Alu Corepressor, PLP; GenBank: CAG33484.1); PRAME (Preferentially Expressed Antigen In Melanoma, Preferentially Expressed Antigen Of Melanoma, MAPE, 01P-4, OIPA, CT130, Cancer/Testis Antigen 130, Melanoma Antigen Preferentially Expressed In Tumors, Opa-Interacting Protein 4, Opa-Interacting Protein 01P4; GenBank: CAG30435.1); pml-RARalpha fusion protein; PMEL17 (silver homolog; SILV; D12S53E; PMEL17; SI; SIL); ME20; gp10 BC001414; BT007202; M32295; M77348; NM-006928; PBF (ZNF395, Zinc Finger Protein 395, PRF-1, Huntington disease regulatory, HD Gene Regulatory Region-Binding Protein, Region-Binding Protein 2, Protein 2, Papillomavirus Regulatory Factor 1, HD-Regulating Factor 2, Papillomavirus-Regulatory Factor, PRF1, HDBP-2, Si-1-8-14, HDBP2, Huntington'S Disease Gene Regulatory Region-Binding Protein 2, HDRF-2, Papillomavirus Regulatory Factor PRF-1, PBF; GenBank: AAH01237.1); PAX5 (Paired Box 5, Paired Box Homeotic Gene 5, BSAP, Paired Box Protein Pax-5, B-Cell Lineage Specific Activator, Paired Domain Gene 5, Paired Box Gene 5 (B-Cell Lineage Specific Activator Protein), B-Cell-Specific Transcription Factor, Paired Box Gene 5 (B-Cell Lineage Specific Activator); PAP (REG3A, Regenerating Islet-Derived 3 Alpha, INGAP, PAP-H, Hepatointestinal Pancreatic Protein, PBBCGF, Human Proislet Peptide, REG-Ill, Pancreatitis-Associated Protein 1, Regi, Reg III-Alpha, hepatocarcinoma-intestine-pancreas, Regenerating Islet-Derived Protein III-Alpha, Pancreatic Beta Cell Growth Factor, HIP, PAP Homologous Protein, HIP/PAP, Proliferation-Inducing Protein 34, PAP1, Proliferation-Inducing Protein 42, REG-3-alpha, Regenerating Islet-Derived Protein 3-Alpha, Pancreatitis-Associated Protein; GenBank: AAH36776.1); p53 (TP53, Tumor Protein P53, TPR53, P53, Cellular Tumor Antigen P53, Antigen NY-CO-13, Mutant Tumor Protein 53, Phosphoprotein P53, P53 Tumor Suppressor, BCC7, Transformation-Related Protein 53, LFS1, tumor Protein 53, Li-Fraumeni Syndrome, Tumor Suppressor P53; P2X5 (Purinergic receptor P2X ligand-gated ion channel 5, an ion channel gated by extracellular ATP, may be involved in synaptic transmission and neurogenesis, deficiency may contribute to the pathophysiology of idiopathic detrusor instability); 422 aa), al: 7.63, MW: 47206 TM: 1 [P] Gene Chromosome: 17p13.3, Genbank accession No. NP-002552.; OGT (0-Linked N-Acetylglucosamine (GlcNAc) Transferase, O-GlcNAc Transferase P110 Subunit, 0-Linked N-Acetylglucosamine (GlcNAc) Transferase (UDP-N-Acetylglucosamine:Polypeptide-N-Acetylglucosaminyl Transferase, UDP-N-Acetylglucosamine-Peptide N-Acetylglucosaminyltransferase 110 KDa Subunit, UDP-N-Acetylglucosamine:Polypeptide-N-Acetylglucosaminyl Transferase, Uridinediphospho-N-Acetylglucosamine:Polypeptide Beta-N-Acetylglucosaminyl Transferase, O-GlcNAc Transferase Subunit P110, EC 2.4.1.255, 0-Linked N-Acetylglucosamine Transferase 110 KDa Subunit, EC 2.4.1, HRNT1, EC 2.4.1.186, 0-GLCNAC; GenBank: AAH38180.1); OA1 (Osteoarthritis QTL 1, OASD; GenBank: CAA88742.1); NY-ESO-1/LAGE-2 (Cancer/Testis Antigen 1 B, CTAG1 B, NY-ESO-1, LAGE-2, ESO1, CTAG1, CTAG, LAGE2B, Cancer/Testis Antigen 1, Autoimmunogenic Cancer/Testis Antigen NY-ESO-1, Ancer Antigen 3, Cancer/Testis Antigen 6.1, New York Esophageal Squamous Cell Carcinoma 1, L Antigen Family Member 2, LAGE2, CT6.1, LAGE2A; GenBank: AAI30365.1); NY-BR-1 (ANKRD30A, Ankyrin Repeat Domain 30A, Breast Cancer Antigen NY-BR-1, Serologically Defined Breast Cancer Antigen NY-BR-1, Ankyrin Repeat Domain-Containing Protein 30A; NCBI Reference Sequence: NP-443723.2); N-ras (NRAS, Neuroblastoma RAS Viral (V-Ras) Oncogene Homolog, NRAS 1, Transforming Protein N-Ras, GTPase NRas, ALPS4, N-Ras Protein Part 4, NS6, Oncogene Homolog, HRAS 1; GenBank: AAH05219.1); NFYC (Nuclear Transcription Factor Y, Gamma, HAPS, HSM, Nuclear Transcription Factor Y Subunit C, Transactivator HSM-1/2, CCAAT Binding Factor Subunit C, NF-YC, CCAAT Transcription Binding Factor Subunit Gamma, CAAT Box DNA-Binding Protein Subunit C, Histone H1 Transcription Factor Large Subunit 2A, CBFC, Nuclear Transcription Factor Y Subunit Gamma, CBF-C, Transactivator HSM-1, H1TF2A, Transcription Factor NF-Y, C Subunit; neo-PAP (PAPOLG, Poly(A) Polymerase Gamma, Neo-Poly(A) Polymerase, Nuclear Poly(A) Polymerase Gamma, Polynucleotide Adenylyltransferase Gamma, SRP RNA 3′ Adenylating Enzyme/Pap2, PAP-gamma, Neo-PAP, SRP RNA 3′-Adenylating Enzyme, PAP2, EC 2.7.7.19, PAPG; NCBI Reference Sequence: NP-075045.2); NCA (CEACAM6, Genbank accession no. M1872); Napi3b (NAPI-3B, NPTIIb, SLC34A2, solute carrier family 34 (sodium phosphate), member 2, type II sodium-dependent phosphate transporter 3b, Genbank accession no. NM-00642); Myosin class I; MUM-3; MUM-2 (TRAPPC1, Trafficking Protein Particle Complex 1, BETS, BETS Homolog, MUM2, Melanoma Ubiquitous Mutated 2, Multiple Myeloma Protein 2, Trafficking Protein Particle Complex Subunit 1; MUM-if; Mucin (MUC1, Mucin 1, Cell Surface Associated, PEMT, PUM, CA 15-3, MCKD1, ADMCKD, Medullary Cystic Kidney Disease 1 (Autosomal Dominant), ADMCKD1, Mucin 1, Transmembrane, CD227, Breast Carcinoma-Associated Antigen DF3, MAM6, Cancer Antigen 15-3, MCD, Carcinoma-Associated Mucin, MCKD, Krebs Von Den Lungen-6, MUC-1/SEC, Peanut-Reactive Urinary Mucin, MUC1/ZD, Tumor-Associated Epithelial Membrane Antigen, DF3 Antigen, Tumor-Associated Mucin, episialin, EMA, H23 Antigen, H23AG, Mucin-1, KL-6, Tumor Associated Epithelial Mucin, MUC-1, Episialin, PEM, CD227 Antigen; UniProtKB/Swiss-Prot: P15941.3); MUCSAC (Mucin SAC, Oligomeric Mucus/Gel-Forming, Tracheobronchial Mucin′ MUC5, TBM, Mucin 5, Subtypes A And C, Tracheobronchial/Gastric, leB, Gastric Mucin, Mucin SAC, Oligomeric Mucus/Gel-Forming Pseudogene, Lewis B Blood Group Antigen, LeB, Major Airway Glycoprotein, MUC-SAC, Mucin-5 Subtype AC, Tracheobronchial; MUC1 (Mucin 1, Cell Surface Associated, PEMT, PUM, CA 15-3, MCKD1, ADMCKD, Medullary Cystic Kidney Disease 1 (Autosomal Dominant), ADMCKD1, Mucin 1, Transmembrane, CD227, Breast Carcinoma-Associated Antigen DF3, MAM6, Cancer Antigen 15-3, MCD, Carcinoma-Associated Mucin, MCKD, Krebs Von Den Lungen-6, MUC-1/SEC, Peanut-Reactive Urinary Mucin, MUC-1/X, Polymorphic Epithelial Mucin, MUC 1/ZD, Tumor-Associated Epithelial Membrane Antigen, DF3 Antigen, Tumor-Associated Mucin, episialin, EMA, h23 Antigen, H23AG, mucin-1, KL-6, Tumor Associated Epithelial Mucin, MUC-1, Episialin, PEM, CD227 Antigen; MSG783 (RNF 124, hypothetical protein FLJ20315, Genbank accession no. NM-01776; MRP4-multidrug resistance-associated protein 4 isoform 3, MOAT-B; MOATB [Homo sapiens]; NCBI Reference Sequence: NP-001288758.1; MPF (MPF, MSLN, SMR, megakaryocyte potentiating factor, mesothelin, Genbank accession no. NM-00582; MMP-7 (MMP7, matrilysin, MPSL1, matrin, Matrix Metalloproteinase 7 (Matrilysin, Uterine), Uterine Matrilysin, Matrix Metalloproteinase-7, EC 3.4.24.23, Pump-1 Protease, Matrin, Uterine Metalloproteinase, PUMP1, MMP-7, EC 3.4.24, PUMP-1; GenBank: AAC37543.1); MMP-2 (MMP2, Matrix Metallopeptidase 2 (Gelatinase A, 72 kDa Gelatinase, 72 kDa Type IV Collagenase), MONA, CLG4A, Matrix Metalloproteinase 2 (Gelatinase A, 72 kD Gelatinase, 72 kD Type IV Collagenase), CLG4, 72 kDa Gelatinase, 72 kDa Type IV Collagenase), Matrix Metalloproteinase-2, MMP-II, 72 KDa Gelatinase, Collagenase Type IV-A, MMP-2, Matrix Metalloproteinase-II, TBE-1, Neutrophil Gelatinase, EC 3.4.24.24, EC 3.4.24; GenBank: AAH02576.1); and Meloe.

[0069] In certain embodiments, the inventive CD3 binding domains and antibodies comprising them comprise a multispecific antibody, for example, a bispecific antibody wherein the multispecific antibody comprises a second binding domain having specificity for a second antigen selected from the group consisting of: 17-IA, 4-1BB, 4Dc, 6-keto-PGFla, 8-iso-PGF2a, 8-oxo-dG, A1 Adenosine Receptor, A33, ACE, ACE-2, Activin, Activin A, Activin AB, Activin B, Activin C, Activin RIA, Activin RIA ALK-2, Activin RIB ALK-4, Activin RIIA, Activin RUB, ADAM, ADAM10, ADAM12, ADAM15, ADAM17/TACE, ADAM8, ADAM9, ADAMTS, ADAMTS4, ADAMTS5, Addressins, aFGF, ALCAM, ALK, ALK-1, ALK-7, alpha-1-antitrypsin, alpha-V/beta-1 antagonist, ANG, Ang, APAF-1, APE, APJ, APP, APRIL, AR, ARC, ART, Artemin, anti-Id, ASPARTIC, Atrial natriuretic factor, av/b3 integrin, Axl, b2M, B7-1, B7-2, B7-H, B-lymphocyte Stimulator (BlyS), BACE, BACE-1, Bad, BAFF, BAFF-R, Bag-1, BAK, Bax, BCA-1, BCAM, Bel, BCMA, BDNF, b-ECGF, bFGF, BID, Bik, BIM, BLC, BL-CAM, BLK, BMP, BMP-2 BMP-2a, BMP-3 Osteogenin, BMP-4 BMP-2b, BMP-5, BMP-6 Vgr-1, BMP-7 (OP-1), BMP-8 (BMP-8a, OP-2), BMPR, BMPR-IA (ALK-3), BMPR-IB (ALK-6), BRK-2, RPK-1, BMPR-II (BRK-3), BMPs, b-NGF, BOK, Bombesin, Bone-derived neurotrophic factor, BPDE, BPDE-DNA, BTC, complement factor 3 (C3), C3a, C4, C5, C5a, CIO, CA125, CAD-8, Calcitonin, cAMP, carcinoembryonic antigen (CEA), carcinoma-associated antigen, Cathepsin A, Cathepsin B, Cathepsin C/DPPI, Cathepsin D, Cathepsin E, Cathepsin H, Cathepsin L, Cathepsin O, Cathepsin S, Cathepsin V, Cathepsin X/Z/P, CBL, CCI, CCK2, CCL, CCL1, CCLll, CCL12, CCL13, CCL 14, CCL15, CCL16, CCL1 7, CCL18, CCL19, CCL2, CCL20, CCL21, CCL22, CCL23, CCL24, CCL25, CCL26, CCL27, CCL28, CCL3, CCL4, CCL5, CCL6, CCL7, CCL8, CCL9/10, CCR, CCR1, CCR10, CCR10, CCR2, CCR3, CCR4, CCR5, CCR6, CCR7, CCR8, CCR9, CD1, CD2, CD4, CD5, CD6, CD7, CD8, CD10, CDlla, CDllb, CDllc, CD13, CD14, CD15, CD16, CD18, CD19, CD20, CD21, CD22, CD23, CD25, CD27L, CD28, CD29, CD30, CD30L, CD32, CD33 (p67 proteins), CD34, CD38, CD40, CD40L, CD44, CD45, CD46, CD49a, CD52, CD54, CD55, CD56, CD61, CD64, CD66e, CD74, CD80 (B7-1), CD89, CD95, CD123, CD137, CD138, CD140a, CD146, CD147, CD148, CD152, CD164, CEACAM5, CFTR, cGMP, CINC, Clostridium botulinum toxin, Clostridium perfringens toxin, CKb8-1, CLC, CMV, CMV UL, CNTF, CNTN-1, COX, C-Ret, CRG-2, CT-1, CTACK, CTGF, CTLA-4, CX3CL1, CX3CR1, CXCL, CXCL1, CXCL2, CXCL3, CXCL4, CXCL5, CXCL6, CXCL7, CXCL8, CXCL9, CXCL10, CXCL11, CXCL12, CXCL13, CXCL14, CXCL15, CXCL16, CXCR, CXCR1, CXCR2, CXCR3, CXCR4, CXCR5, CXCR6, cytokeratin tumor-associated antigen, DAN, DCC, DcR3, DC-SIGN, Decay accelerating factor, des(1-3)-IGF-I (brain IGF-1), Dhh, digoxin, DNAM-1, Dnase, Dpp, DPPIV/CD26, Dtk, ECAD, EDA, EDA-A1, EDA-A2, EDAR, EGF, EGFR (ErbB-1), EMA, EMMPRIN, EN A, endothelin receptor, Enkephalinase, eNOS, Eot, eotaxinl, EpCAM, Ephrin B2/EphB4, EPO, ERCC, E-selectin, ET-1, Factor Ila, Factor VII, Factor VIIIc, Factor IX, fibroblast activation protein (FAP), Fas, FcRI, FEN-1, Ferritin, FGF, FGF-19, FGF-2, FGF3, FGF-8, FGFR, FGFR-3, Fibrin, FL, FLIP, Flt-3, Flt-4, Follicle stimulating hormone, Fractalkine, FZD1, FZD2, FZD3, FZD4, FZD5, FZD6, FZD7, FZD8, FZD9, FZD10, G250, Gas 6, GCP-2, GCSF, GD2, GD3, GDF, GDF-1, GDF-3 (Vgr-2), GDF-5 (BMP-14, CDMP-1), GDF-6 (BMP-13, CDMP-2), GDF-7 (BMP-12, CDMP-3), GDF-8 (Myostatin), GDF-9, GDF-15 (MIC-1), GDNF, GDNF, GFAP, GFRa-1, GFR-alphal, GFR-alpha2, GFR-alpha3, GITR, Glucagon, Glut 4, glycoprotein Ilb/IIIa (GP Ilb/IIIa), GM-CSF, gp130, gp72, GRO, Growth hormone releasing factor, Hapten (NP-cap or NIP-cap), HB-EGF, HCC, HCMV gB envelope glycoprotein, HCMV) gH envelope glycoprotein, HCMV UL, Hemopoietic growth factor (HGF), Hep B gp120, heparanase, Her2, Her2/neu (ErbB-2), Her3 (ErbB-3), Her4 (ErbB-4), herpes simplex virus (HSV) gB glycoprotein, HSV gD glycoprotein, HGFA, High molecular weight melanoma-associated antigen (HMW-MAA), HIV gp120, HIV IIIB gp 120 V3 loop, HLA, HLA-DR, HM1.24, HMFG PEM, HRG, Hrk, human cardiac myosin, human cytomegalovirus (HCMV), human growth hormone (HGH), HVEM, 1-309, IAP, ICAM, ICAM-1, ICAM-3, ICE, ICOS, IFNg, Ig, IgA receptor, IgE, IGF, IGF binding proteins, IGF-1R, IGFBP, IGF-I, IGF-II, IL, IL-1, IL-1R, IL-2, IL-2R, IL-4, IL-4R, IL-5, IL-5R, IL-6, IL-6R, IL-8, IL-9, IL-10, IL-12, IL-13, IL-15, IL-18, IL-18R, IL-23, interferon (INF)-alpha, INF-beta, INF-gamma, Inhibin, iNOS, Insulin A-chain, Insulin B-chain, Insulin-like growth factor 1, integrin alpha2, integrin alpha3, integrin alpha4, integrin alpha4/betal, integrin, alpha4/beta7, integrin alpha5 (alphaV), integrin alpha5/betal, integrin alpha5/beta3, integrin alpha6, integrin betal, integrin beta2, interferon gamma, IP-10, 1-TAC, JE, Kallikrein 2, Kallikrein 5, Kallikrein 6, Kallikrein 11, Kallikrein 12, Kallikrein 14, Kallikrein 15, Kallikrein LI, Kallikrein L2, Kallikrein L3, Kallikrein L4, KC, KDR, Keratinocyte Growth Factor (KGF), laminin 5, LAMP, LAP, LAP (TGF-1), Latent TGF-1, Latent TGF-1 bpl, LBP, LDGF, LECT2, Lefty, Lewis-Y antigen, Lewis-Y related antigen, LFA-1, LFA-3, Lfo, LIF, LIGHT, lipoproteins, LIX, LKN, Lptn, L-Selectin, LT-a, LT-b, LTB4, LTBP-1, Lung surfactant, Luteinizing hormone, Lymphotoxin Beta Receptor, Mac-1, MAdCAM, MAG, MAP2, MARC, MCAM, MCAM, MCK-2, MCP, M-CSF, MDC, Mer, METALLOPROTEASES, MGDF receptor, MGMT, MHC (HLA-DR), MIF, MIG, MIP, MIP-1-alpha, MK, MMAC1, MMP, MMP-1, MMP-10, MMP-11, MMP-12, MMP-13, MMP-14, MMP-15, MMP-2, MMP-24, MMP-3, MMP-7, MMP-8, MMP-9, MPIF, Mpo, MSK, MSP, mucin (Mucl), MUC 18, Muellerian-inhibitin substance, Mug, MuSK, NAIP, NAP, NCAD, N-Cadherin, NCA 90, NCAM, NCAM, Neprilysin, Neurotrophin-3,-4, or -6, Neurturin, Neuronal growth factor (NGF), NGFR, NGF-beta, nNOS, NO, NOS, Npn, NRG-3, NT, NTN, OB, OGG1, OPG, OPN, OSM, OX40L, OX40R, p150, p95, PADPr, Parathyroid hormone, PARC, PARP, PBR, PBSF, PCAD, P-Cadherin, PCNA, PDGF, PDGF, PDK-1, PECAM, PEM, PF4, PGE, PGF, PGI2, PGJ2, PIN, PLA2, placental alkaline phosphatase (PLAP), P1GF, PLP, PP14, Proinsulin, Prorelaxin, Protein C, PS, PSA, PSCA, prostate specific membrane antigen (PSMA), PTEN, PTHrp, Ptk, PTN, R51, RANK, RANKL, RANTES, RANTES, Relaxin A-chain, Relaxin B-chain, renin, respiratory syncytial virus (RSV) F, RSV Fgp, Ret, Rheumatoid factors, RLIP76, RPA2, RSK, S 100, SCF/KL, SDF-1, SERINE, Serum albumin, sFRP-3, Shh, SIGIRR, SK-1, SLAM, SLPI, SMAC, SMDF, SMOH, SOD, SPARC, Stat, STEAP, STEAP-II, TACE, TACI, TAG-72 (tumor-associated glycoprotein-72), TARC, TCA-3, T-cell receptors (e.g., T-cell receptor alpha/beta), TdT, TECK, TEM1, TEM5, TEM7, TEM8, TERT, testicular PLAP-like alkaline phosphatase, TfR, TGF, TGF-alpha, TGF-beta, TGF-beta Pan Specific, TGF-beta RI (ALK-5), TGF-beta RII, TGF-beta Rllb, TGF-beta RIII, TGF-betal, TGF-beta2, TGF-beta3, TGF-beta4, TGF-beta5, Thrombin, Thymus Ck-1, Thyroid stimulating hormone, Tie, TIMP, TIQ, Tissue Factor, TMEFF2, Tmpo, TMPRSS2, TNF, TNF-alpha, TNF-alpha beta, TNF-beta2, TNFc, TNF-RI, TNF-RII, TNFRSF10A (TRAIL R1 Apo-2, DR4), TNFRSFIOB (TRAIL R2 DR5, KILLER, TRICK-2A, TRICK-B), TNFRSF10C (TRAIL R3 DcRI, LIT, TRID), TNFRSF10D (TRAIL R4 DcR2, TRUNDD), TNFRSF11A (RANK ODF R, TRANCE R), TNFRSFllB (OPG OCIF, TR1), TNFRSF12 (TWEAK R FN14), TNFRSF13B (TACI), TNFRSF13C (BAFF R), TNFRSF14 (HVEM ATAR, HveA, LIGHT R, TR2), TNFRSF16 (NGFR p75NTR), TNFRSF17 (BCMA), TNFRSF 18 (GITR AITR), TNFRSF 19 (TROY TAJ, TRADE), TNFRSF 19L (RELT), TNFRSFIA (TNF RI CD120a, p55-60), TNFRSFIB (TNF RII CD120b, p75-80), TNFRSF26 (TNFRH3), TNFRSF3 (LTbR TNF RIII, TNFC R), TNFRSF4 (OX40 ACT35, TXGP1 R), TNFRSF5 (CD40 p50), TNFRSF6 (Fas Apo-1, APT1, CD95), TNFRSF6B (DcR3 M68, TR6), TNFRSF7 (CD27), TNFRSF8 (CD30), TNFRSF9 (4-1BB CD137, ILA), TNFRSF21 (DR6), TNFRSF22 (DcTRAIL R2 TNFRH2), TNFRST23 (DcTRAIL R1 TNFRH1), TNFRSF25 (DR3 Apo-3, LARD, TR-3, TRAMP, WSL-1), TNFSF10 (TRAIL Apo-2 Ligand, TL2), TNFSF11 (TRANCE/RANK Ligand ODF, OPG Ligand), TNFSF 12 (TWEAK Apo-3 Ligand, DR3 Ligand), TNFSF13 (APRIL TALL2), TNFSF13B (BAFF BLYS, TALL1, THANK, TNFSF20), TNFSF14 (LIGHT HVEM Ligand, LTg), TNFSF15 (TL1A/VEGI), TNFSF 18 (GITR Ligand AITR Ligand, TL6), TNFSFIA (TNF-a Conectin, DIF, TNFSF2), TNFSF1B (TNF-b LTa, TNFSF1), TNFSF3 (LTb TNFC, p33), TNFSF4 (OX40 Ligand gp34, TXGP1), TNFSF5 (CD40 Ligand CD154, gp39, HIGM1, IMD3, TRAP), TNFSF6 (Fas Ligand Apo-1 Ligand, APT1 Ligand), TNFSF7 (CD27 Ligand CD70), TNFSF8 (CD30 Ligand CD153), TNFSF9 (4-1BB Ligand CD137 Ligand), TP-1, t-PA, Tpo, TRAIL, TRAIL R, TRAIL-R1, TRAIL-R2, TRANCE, transferring receptor, TRF, Trk, TROP-2, TSG, TSLP, tumor-associated antigen CA 125, tumor-associated antigen expressing Lewis Y related carbohydrate, TWEAK, TXB2, Ung, uPAR, uPAR-1, Urokinase, VCAM, VCAM-1, VECAD, VE-Cadherin, VE-cadherin-2, VEFGR-1 (flt-1), VEGF, VEGFR, VEGFR-3 (flt-4), VEGI, VIM, Viral antigens, VLA, VLA-1, VLA-4, VNR integrin, von Willebrands factor, WIF-1, WNT1, WNT2, WNT2B/13, WNT3, WNT3A, WNT4, WNT5A, WNT5B, WNT6, WNT7A, WNT7B, WNT8A, WNT8B, WNT9A, WNT9A, WNT9B, WNT10A, WNT10B, WNT11, WNT16, XCL1, XCL2, XCR1, XCR1, XEDAR, XIAP, XPD, CTLA4 (cytotoxic T lymphocyte antigen-4), PD1 (programmed cell death protein 1), PD-L1 (programmed cell death ligand 1), LAG-3 (lymphocyte activation gene-3), TIM-3 (T cell immunoglobulin and mucin protein-3), receptors for hormones, and growth factors.

[0070] In certain embodiments, the inventive CD3 binding domains and antibodies comprising them comprise a multispecific antibody, for example, a bispecific antibody wherein the multispecific antibody comprises a second binding domain having specificity for a second antigen selected from the group consisting of: BCMA, CTLA4 (cytotoxic T lymphocyte antigen-4), PD 1 (programmed cell death protein 1), PD-L1 (programmed cell death ligand 1), LAG-3 (lymphocyte activation gene-3), TIM-3, CD20, CD2, CD19, Her2, EGFR, EpCAM, FcyRIIIa (CD16), FcyRIIa (CD32a), FcyRIIb (CD32b), FcyRI (CD64), Toll-like receptors (TLRs), TLR4, TLR9, cytokines, IL-2, IL-5, IL-13, IL-6, IL-17, IL-12, IL-23, TNFa, TGFb, cytokine receptors, IL-2R, chemokines, chemokine receptors, growth factors, VEGF, and HGF.

[0071] In certain embodiments, the inventive CD3 binding domains and antibodies comprising them comprise at least a second antigen binding domain that specifically binds to an antigen, wherein said antibody comprises a multispecific format selected from the group consisting of: Fab-Fc-scFv, “bottle-opener”, Mab-scFv, Mab-Fv, Dual scFv, central Fv, central scFv, one-arm central scFv, Fab-Fab, Fab-Fv, mAb-Fv, mAb-Fab, DART, BiTE, common light chain-IgG, TandAb, Cross-Mab, SEED, BEAT, TrioMab, and DuetMab.

[0072] In certain embodiments are provided isolated nucleic acid sequences encoding the inventive CD3 binding domains and antibodies comprising them.

[0073] In certain embodiments are provided expression vectors comprising nucleic acid sequences encoding the inventive CD3 binding domains and antibodies comprising them.

[0074] In certain embodiments are provided host cells transfected, transformed, or transduced with a nucleic acid sequences encoding the inventive CD3 binding domains and antibodies comprising them.

[0075] In certain embodiments are provided host cells transfected, transformed, or transduced with vectors encoding the inventive CD3 binding domains and antibodies comprising them.

[0076] In certain embodiments are provided pharmaceutical compositions comprising one or more of the inventive CD3 binding domains and antibodies comprising them.

[0077] In certain embodiments are provided pharmaceutical compositions comprising one or more of the inventive CD3 binding domains and antibodies comprising them and a pharmaceutically acceptable carrier and/or excipient.

[0078] In certain embodiments are provided pharmaceutical compositions comprising one or more nucleic acids encoding one or more of the inventive CD3 binding domains and antibodies comprising them.

[0079] In certain embodiments are provided pharmaceutical compositions comprising one or more vectors encoding one or more of the inventive CD3 binding domains and antibodies comprising them and a pharmaceutically acceptable carrier and/or excipient.

[0080] In certain embodiments are provided methods of treating or delaying the progression of a disorder in a mammal in need of such treating, the methods comprising administering one or more of the inventive CD3 binding domains and antibodies comprising them, wherein the disorder is decreased or ameliorated as a result of said administering. In certain embodiments are provided methods of preventing or decreasing risk of developing a disorder in a mammal by administering one or more of the inventive CD3 binding domains and antibodies comprising them, wherein the disorder is prevented as a result of said administering. In certain embodiments are provided methods of treating a disorder in a mammal in need of such treating, wherein the disorder comprises a proliferative disorder, an oncological disorder, an immuno-oncological disorder, a neurological disorder, a neurodegenerative disorder, or an autoimmune disorder, comprising administering one or more of the inventive CD3 binding domains and antibodies comprising them, wherein the disorder is decreased or ameliorated as a result of said administering. In certain embodiments such methods further comprise administering to the mammal an additional therapeutic agent. In certain embodiments such mammal is a human.

[0081] In certain embodiments is provided a heterodimeric CD3 fusion protein comprising: a first polypeptide chain comprising a CD3 epsilon polypeptide fused to a first Fc region; and a second polypeptide chain comprising CD3 delta polypeptide fused to a second Fc region. In certain embodiments, the CD3 epsilon polypeptide comprises a human CD3 epsilon polypeptide and the CD3 delta polypeptide comprises a human CD3 delta polypeptide. In certain embodiments, the CD3 epsilon polypeptide is a human CD3 epsilon polypeptide and the CD3 delta polypeptide is a human CD3 delta polypeptide. In certain embodiments, the CD3 epsilon polypeptide comprises a cynomolgus CD3 epsilon polypeptide and the CD3 delta polypeptide comprises a cynomolgus CD3 delta polypeptide. In certain embodiments the CD3 epsilon polypeptide is a cynomolgus CD3 epsilon polypeptide and the CD3 delta polypeptide is a cynomolgus CD3 delta polypeptide. In certain embodiments the first polypeptide of the heterodimeric CD3 fusion protein comprises the following amino acid sequence: QDGNEEMGGITQTPYKVSISGTTVILTCPQYPGSEILWQHNDKNIGGDEDDKNIGSDEDH LSLKEFSELEQSGYYVCYPRGSKPEDANFYLYLRARVCENCMEMDGGSDKTHTCPPCP APELLGGPSVFLFPPKPKDTLMISRTPEVTCVVVDVSHEDPEVKFNWYVDGVEVHNAKT KPREEQYASTYRVVSVLTVLHQDWLNGKEYKCKVSNKALPAPIEKTISKAKGQPREPQV YTLPPSRDELTKNQVSLTCLVKGFYPSDIAVEWESNGQPENNYKTTPPVLDSDGSFFLYS KLTVDKSRWQQGNVFSCSVMHEALHNHYTQKSLSLSPGK (SEQ ID NO: 6716); and the second polypeptide chain comprises the following amino acid sequence: FKIPIEELEDRVFVNCNTSITWVEGTVGTLLSDITRLDLGKRILDPRGIYRCNGTDIYKDKE STVQVHYRMCQSCVELDGGSDKTHTCPPCPAPELLGGPSVFLFPPKPKDTLMISRTPEVT CVVVDVSHEDPEVKFNWYVDGVEVHNAKTKPREEQYASTYRVVSVLTVLHQDWLNG KEYKCKVSNKALPAPIEKTISKAKGQPREPQVYTLPPSRDELTKNQVSLTCLVKGFYPSD IAVEWESNGQPENNYKTTPPVLDSDGSFFLYSKLTVDKSRWQQGNVFSCSVMHEALHN HYTQKSLSLSPGK (SEQ ID NO: 6717). In certain embodiments the first polypeptide of the heterodimeric CD3 fusion protein comprises the following amino acid sequence: QDGNEEMGSITQTPYQVSISGTTVILTCSQHLGSEAQWQHNGKNKEDSGDRLFLPEFSE MEQSGYYVCYPRGSNPEDASHHLYLKARVCENCMEMDGGSDKTHTCPPCPAPELLGGP SVFLFPPKPKDTLMISRTPEVTCVVVDVSHEDPEVKFNWYVDGVEVHNAKTKPREEQY ASTYRVVSVLTVLHQDWLNGKEYKCKVSNKALPAPIEKTISKAKGQPREPQVYTLPPSR DELTKNQVSLTCLVKGFYPSDIAVEWESNGQPENNYKTTPPVLDSDGSFFLYSKLTVDK SRWQQGNVFSCSVMHEALHNHYTQKSLSLSPGK (SEQ ID NO: 6718); and the second polypeptide chain comprises the following amino acid sequence: FKIPVEELEDRVFVKCNTSVTWVEGTVGTLLTNNTRLDLGKRILDPRGIYRCNGTDIYKD KESAVQVHYRMCQNCVELDPGSDKTHTCPPCPAPELLGGPSVFLFPPKPKDTLMISRTPE VTCVVVDVSHEDPEVKFNWYVDGVEVHNAKTKPREEQYASTYRVVSVLTVLHQDWL NGKEYKCKVSNKALPAPIEKTISKAKGQPREPQVYTLPPSRDELTKNQVSLTCLVKGFYP SDIAVEWESNGQPENNYKTTPPVLDSDGSFFLYSKLTVDKSRWQQGNVFSCSVMHEAL HNHYTQKSLSLSPGK (SEQ ID NO: 6719). In certain embodiments are provided uses of such heterodimeric CD3 fusion proteins in identifying, isolating, selecting, generating, and/or characterizing CD3 binding domains and antibodies comprising them.

### DETAILED DESCRIPTION OF THE INVENTION

[0082] Unless defined otherwise, all technical and scientific terms used herein have the same meaning as commonly understood by one of ordinary skill in the art to which this invention belongs. As used herein, the term “about,” when used in reference to a particular recited numerical value, means that the value may vary from the recited value by no more than 1%. For example, as used herein, the expression “about 100” includes 99 and 101 and all values in between (e.g., 99.1, 99.2, 99.3, 99.4, etc.).

[0083] It is understood that aspects and embodiments of the invention described herein include “comprising,” “consisting,” and “consisting essentially of” aspects and embodiments.

[0084] “Cluster of Differentiation 3” or “CD3”, generally refers to any native CD3 from any vertebrate source, including mammals such as primates (e.g., humans) and rodents (e.g., mice and rats), unless otherwise indicated, including, for example, CD3ε, CD3γ, CD3α, and CD3β chains. The term encompasses “full-length,” unprocessed CD3 (e.g., unprocessed or unmodified CD3ε or CD3γ), as well as any form of CD3 that results from processing in the cell. The term also encompasses naturally occurring variants of CD3, including, for example, splice variants or allelic variants. CD3 includes, for example, human CD3ε protein (NCBI RefSeq No. NP_000724), which is 207 amino acids in length, and human CD3γ protein (NCBI RefSeq No. NP_000064), which is 182 amino acids in length. The term also refers to either the human or cynomolgus CD3 epsilon protein, the amino acid sequence for which is depcted, for example in FIG. 18 herein. “CD3εN27” and “CD3εN13” refer to the N-terminal 27 amino acids and the N-terminal 13 amino acids, respectively, of CD3, and optionally containing chemical modifications or cojugations made thereto.

[0085] The “class” of an antibody refers to the type of constant domain or constant region possessed by its heavy chain. There are five major classes of antibodies: IgA, IgD, IgE, IgG, and IgM, and several of these may be further divided into subclasses (isotypes), e.g., IgG₁, IgG₂, IgG₃, IgG₄, IgA₁, and IgA₂. The heavy chain constant domains that correspond to the different classes of immunoglobulins are called α, δ, ε, γ, and μ, respectively.

[0086] The term “cytotoxic agent” as used herein refers to a substance that inhibits or prevents a cellular function and/or causes cell death or destruction. Cytotoxic agents include, but are not limited to, radioactive isotopes (e.g., At²¹¹, I¹³¹, I¹²⁵, Y⁹⁰, Re¹⁸⁶, Re⁸⁸, Sm¹⁵³, Bi²¹², P³², Pb²¹² and radioactive isotopes of Lu); chemotherapeutic agents or drugs (e.g., methotrexate, adriamicin, vinca alkaloids (vincristine, vinblastine, etoposide), doxorubicin, melphalan, mitomycin C, chlorambucil, daunorubicin or other intercalating agents); growth inhibitory agents; enzymes and fragments thereof such as nucleolytic enzymes; antibiotics; toxins such as small molecule toxins or enzymatically active toxins of bacterial, fungal, plant or animal origin, including fragments and/or variants thereof; and the various antitumor or anticancer agents disclosed below.

[0087] A “disorder” refers to any condition or disease that would benefit from treatment including, but not limited to, chronic and acute disorders or diseases including those pathological conditions which predispose a mammal to the disorder in question.

[0088] The terms “cell proliferative disorder” and “proliferative disorder” refer to disorders that are associated with some degree of abnormal cell proliferation. In one embodiment, the cell proliferative disorder comprises cancer. In one embodiment, the cell proliferative disorder comprises a tumor.

[0089] The terms “cancer” and “cancerous” refer to or describe the physiological condition in mammals that is typically characterized by unregulated cell growth. Examples of cancer include but are not limited to, carcinoma, lymphoma, blastoma, sarcoma, and leukemia or lymphoid malignancies. More particular examples of such cancers include, but not limited to, squamous cell cancer (e.g., epithelial squamous cell cancer), lung cancer including small-cell lung cancer, non-small cell lung cancer, adenocarcinoma of the lung and squamous carcinoma of the lung, cancer of the peritoneum, hepatocellular cancer, gastric or stomach cancer including gastrointestinal cancer and gastrointestinal stromal cancer, pancreatic cancer, glioblastoma, cervical cancer, ovarian cancer, liver cancer, bladder cancer, cancer of the urinary tract, hepatoma, breast cancer, colon cancer, rectal cancer, colorectal cancer, endometrial or uterine carcinoma, salivary gland carcinoma, kidney or renal cancer, prostate cancer, vulval cancer, thyroid cancer, hepatic carcinoma, anal carcinoma, penile carcinoma, melanoma, superficial spreading melanoma, lentigo maligna melanoma, acral lentiginous melanomas, nodular melanomas, multiple myeloma and B-cell lymphoma (including low grade/follicular non-Hodgkin's lymphoma (NHL); small lymphocytic (SL) NHL; intermediate grade/follicular NHL; intermediate grade diffuse NHL; high grade immunoblastic NHL; high grade lymphoblastic NHL; high grade small non-cleaved cell NHL; bulky disease NHL; mantle cell lymphoma; AIDS-related lymphoma; and Waldenstrom's Macroglobulinemia); chronic lymphocytic leukemia (CLL); acute lymphoblastic leukemia (ALL); hairy cell leukemia; chronic myeloblastic leukemia; and post-transplant lymphoproliferative disorder (PTLD), as well as abnormal vascular proliferation associated with phakomatoses, edema (such as that associated with brain tumors), Meigs' syndrome, brain, as well as head and neck cancer, and associated metastases. In certain embodiments, cancers that are amenable to treatment by the antibodies of the invention include breast cancer, colorectal cancer, rectal cancer, non-small cell lung cancer, glioblastoma, non-Hodgkins lymphoma (NHL), renal cell cancer, prostate cancer, liver cancer, pancreatic cancer, soft-tissue sarcoma, kaposi's sarcoma, carcinoid carcinoma, head and neck cancer, ovarian cancer, mesothelioma, and multiple myeloma. In some embodiments, the cancer is selected from: small cell lung cancer, gliblastoma, neuroblastomas, melanoma, breast carcinoma, gastric cancer, colorectal cancer (CRC), and hepatocellular carcinoma. Yet, in some embodiments, the cancer is selected from: non-small cell lung cancer, colorectal cancer, glioblastoma and breast carcinoma, including metastatic forms of those cancers. In other embodiments, the cancer is selected from a class of mature B-Cell cancers excluding Hodgkin's Lymphoma but including germinal-center B-cell-like (GCB) DLBCL, activated B-cell-like (ABC) DLBCL, follicular lymphoma (FL), mantle cell lymphoma (MCL), acute myeloid leukemia (AML), chronic lymphoid leukemia (CLL), marginal zone lymphoma (MZL), small lymphocytic leukemia (SLL), lymphoplasmacytic lymphoma (LL), Waldenstrom macroglobulinemia (WM), central nervous system lymphoma (CNSL), Burkitt's lymphoma (BL), B-cell prolymphocytic leukemia, Splenic marginal zone lymphoma, Hairy cell leukemia, Splenic lymphoma/leukemia, unclassifiable, Splenic diffuse red pulp small B-cell lymphoma, Hairy cell leukemia variant, Waldenstrom macroglobulinemia, Heavy chain diseases, a Heavy chain disease, γ Heavy chain disease, μ Heavy chain disease, Plasma cell myeloma, Solitary plasmacytoma of bone, Extraosseous plasmacytoma, Extranodal marginal zone lymphoma of mucosa-associated lymphoid tissue (MALT lymphoma), Nodal marginal zone lymphoma, Pediatric nodal marginal zone lymphoma, Pediatric follicular lymphoma, Primary cutaneous follicle centre lymphoma, T-cell/histiocyte rich large B-cell lymphoma, Primary DLBCL of the CNS, Primary cutaneous DLBCL, leg type, EBV-positive DLBCL of the elderly, DLBCL associated with chronic inflammation, Lymphomatoid granulomatosis, Primary mediastinal (thymic) large B-cell lymphoma, Intravascular large B-cell lymphoma, ALK-positive large B-cell lymphoma, Plasmablastic lymphoma, Large B-cell lymphoma arising in HHV8-associated multicentric Castleman disease, Primary effusion lymphoma: B-cell lymphoma, unclassifiable, with features intermediate between diffuse large B-cell lymphoma and Burkitt lymphoma, and B-cell lymphoma, unclassifiable, with features intermediate between diffuse large B-cell lymphoma and classical Hodgkin lymphoma.

[0090] The term “tumor” as used herein, refers to all neoplastic cell growth and proliferation, whether malignant or benign, and all pre-cancerous and cancerous cells and tissues. The terms “cancer”, “cancerous”, “cell proliferative disorder”, “proliferative disorder” and “tumor” are not mutually exclusive as referred to herein.

[0091] The term “tumor antigen” as used herein, may be understood as those antigens that are presented on tumor cells. These antigens can be presented on the cell surface with an extracellular part, which is often combined with a transmembrane and cytoplasmic part of the molecule. These antigens can sometimes be presented only by tumor cells and never by the normal ones. Tumor antigens can be exclusively expressed on tumor cells or might represent a tumor specific mutation compared to normal cells. In this case, they are called tumor-specific antigens. More common are tumor antigens that are presented by tumor cells and normal cells, and they are called tumor-associated antigens. These tumor-associated antigens can be overexpressed compared to normal cells or are accessible for antibody binding in tumor cells due to the less compact structure of the tumor tissue compared to normal tissue.

[0092] The term “EC₅₀” refers to the “half maximal effective concentration”, which value measures the effectiveness of compound (e.g. an anti-CD3 bonding domain-comprising antibody) towards a biological or biochemical utility. This quantitative measure indicates the quantity or concentration required for a particular compound or antibody to elicit a given biological process to half of the maximal response.

[0093] “Effector functions” refer to those biological activities attributable to the Fc region of an antibody, which vary with the antibody isotype. Examples of antibody effector functions include: C1q binding and complement dependent cytotoxicity (CDC); Fc receptor binding; antibody-dependent cell-mediated cytotoxicity (ADCC); phagocytosis; down regulation of cell surface receptors (e.g., B cell receptor); and B cell activation.

[0094] An “effective amount” of a compound, for example, an anti-CD3 antibody of the invention or a composition (e.g., pharmaceutical composition) thereof, is at least the minimum amount required to achieve the desired therapeutic or prophylactic result, such as a measurable improvement or prevention of a particular disorder (e.g., a cell proliferative disorder, e.g., cancer). An effective amount herein may vary according to factors such as the disease state, age, sex, and weight of the patient, and the ability of the antibody to elicit a desired response in the individual. An effective amount is also one in which any toxic or detrimental effects of the treatment are outweighed by the therapeutically beneficial effects. For prophylactic use, beneficial or desired results include results such as eliminating or reducing the risk, lessening the severity, or delaying the onset of the disease, including biochemical, histological and/or behavioral symptoms of the disease, its complications and intermediate pathological phenotypes presenting during development of the disease. For therapeutic use, beneficial or desired results include clinical results such as decreasing one or more symptoms resulting from the disease, increasing the quality of life of those suffering from the disease, decreasing the dose of other medications required to treat the disease, enhancing effect of another medication such as via targeting, delaying the progression of the disease, and/or prolonging survival. In the case of cancer or tumor, an effective amount of the drug may have the effect in reducing the number of cancer cells; reducing the tumor size; inhibiting (i.e., slow to some extent or desirably stop) cancer cell infiltration into peripheral organs; inhibit (i.e., slow to some extent and desirably stop) tumor metastasis; inhibiting to some extent tumor growth; and/or relieving to some extent one or more of the symptoms associated with the disorder. An effective amount can be administered in one or more administrations. For purposes of this invention, an effective amount of drug, compound, or pharmaceutical composition is an amount sufficient to accomplish prophylactic or therapeutic treatment either directly or indirectly. As is understood in the clinical context, an effective amount of a drug, compound, or pharmaceutical composition may or may not be achieved in conjunction with another drug, compound, or pharmaceutical composition. Thus, an “effective amount” may be considered in the context of administering one or more therapeutic agents, and a single agent may be considered to be given in an effective amount if, in conjunction with one or more other agents, a desirable result may be or is achieved.

[0095] The term “Fc region” herein is used to define a C-terminal region of an immunoglobulin heavy chain that contains at least a portion of the constant region. The term includes native sequence Fc regions and variant Fc regions. In one embodiment, a human IgG heavy chain Fc region extends from Cys226, or from Pro230, to the carboxyl-terminus of the heavy chain. However, the C-terminal lysine (Lys447) of the Fc region may or may not be present. Unless otherwise specified herein, numbering of amino acid residues in the Fc region or constant region is according to the EU numbering system, also called the EU index, as described in Kabat et al., Sequences of Proteins of Immunological Interest, 5th Ed. Public Health Service, National Institutes of Health, Bethesda, Md., 1991.

[0096] “Framework” or “FR” refers to variable domain residues other than complementary determining region (CDR) residues. The FR of a variable domain generally consists of four FR domains: FR1, FR2, FR3, and FR4. Accordingly, the CDR and FR sequences generally appear in the following sequence in VH (or VL): FR1-H1(L1)-FR2-H2(L2)-FR3-H3 (L3)-FR4.

[0097] The terms “full-length antibody,” “intact antibody,” and “whole antibody” are used herein interchangeably to refer to an antibody having a structure substantially similar to a native antibody structure or having heavy chains that contain an Fc region as defined herein.

[0098] A “growth inhibitory agent” when used herein refers to a compound or composition which inhibits growth of a cell either in vitro or in vivo. In one embodiment, growth inhibitory agent is growth inhibitory antibody that prevents or reduces proliferation of a cell expressing an antigen to which the antibody binds. In another embodiment, the growth inhibitory agent may be one which significantly reduces the percentage of cells in S phase. Examples of growth inhibitory agents include agents that block cell cycle progression (at a place other than S phase), such as agents that induce G1 arrest and M-phase arrest. Classical M-phase blockers include the vincas (vincristine and vinblastine), taxanes, and topoisomerase II inhibitors such as doxorubicin, epirubicin, daunorubicin, etoposide, and bleomycin. Those agents that arrest G1 also spill over into S-phase arrest, for example, DNA alkylating agents such as tamoxifen, prednisone, dacarbazine, mechlorethamine, cisplatin, methotrexate, 5-fluorouracil, and ara-C. Further information can be found in Mendelsohn and Israel, eds., The Molecular Basis of Cancer, Chapter 1, entitled “Cell cycle regulation, oncogenes, and antineoplastic drugs” by Murakami et al. (W.B. Saunders, Philadelphia, 1995), e.g., p. 13. The taxanes (paclitaxel and docetaxel) are anticancer drugs both derived from the yew tree. Docetaxel (TAXOTERE®, RHONE-POULENC RORER), derived from the European yew, is a semisynthetic analogue of paclitaxel (TAXOL®, BRISTOL-MYERS SQUIBB). Paclitaxel and docetaxel promote the assembly of microtubules from tubulin dimers and stabilize microtubules by preventing depolymerization, which results in the inhibition of mitosis in cells.

[0099] A phrase that includes an antigen and the term, “-positive”, such as “HER2-positive”, means that a disease, condition, or disorder is characterized, inter alia, by higher than normal levels of the referenced antigen or target. In certain embodiments, the antigen or target comprises a moiety that is expressed or otherwise present on cancer cells at a level that is higher than on normal cells.

[0100] The terms “host cell,” “host cell line,” and “host cell culture” are used interchangeably and refer to cells into which exogenous nucleic acid has been introduced, including the progeny of such cells. Host cells include “transformants” and “transformed cells,” which include the primary transformed cell and progeny derived therefrom without regard to the number of passages. Progeny may not be completely identical in nucleic acid content to a parent cell, but may contain mutations. Mutant progeny that have the same function or biological activity as screened or selected for in the originally transformed cell are included herein.

[0101] A “human antibody” is one which possesses an amino acid sequence which corresponds to that of an antibody produced by a human or a human cell or derived from a non-human source that utilizes human antibody repertoires or other human antibody-encoding sequences. This definition of a human antibody specifically excludes a humanized antibody comprising non-human antigen-binding residues. Human antibodies can be produced using various techniques known in the art, including phage-display libraries. Hoogenboom and Winter, J. Mol. Biol., 227:381 (1991); Marks et al., J. Mol. Biol., 222:581 (1991). Also available for the preparation of human monoclonal antibodies are methods described in Cole et al., Monoclonal Antibodies and Cancer Therapy, Alan R. Liss, p. 77 (1985); Boerner et al., J. Immunol. 147(1):86-95 (1991). See also van Dijk and van de Winkel, Curr. Opin. Pharmacol., 5: 368-74 (2001). Human antibodies can be prepared by administering the antigen to a transgenic animal that has been modified to produce such antibodies in response to antigenic challenge, but whose endogenous loci have been disabled, e.g., immunized xenomice (see, e.g., U.S. Pat. Nos. 6,075,181 and 6,150,584 regarding XENOMOUSE technology). See also, for example, Li et al., Proc. Natl. Acad. Sci. USA, 103:3557-3562 (2006) regarding human antibodies generated via a human B-cell hybridoma technology. The term “human antibody”, as used herein, is intended to include antibodies having variable and constant regions derived from human germline immunoglobulin sequences. The human mAbs of the invention may include amino acid residues not encoded by human germline immunoglobulin sequences (e.g., mutations introduced by random or site-specific mutagenesis in vitro or by somatic mutation in vivo), for example in the CDRs and in particular CDR3. However, the term “human antibody”, as used herein, is not intended to include mAbs in which CDR sequences derived from the germline of another mammalian species (e.g., mouse), have been grafted onto human FR sequences.

[0102] A “human consensus framework” is a framework which represents the most commonly occurring amino acid residues in a selection of human immunoglobulin VL or VH framework sequences. Generally, the selection of human immunoglobulin VL or VH sequences is from a subgroup of variable domain sequences. Generally, the subgroup of sequences is a subgroup as in Kabat et al., Sequences of Proteins of Immunological Interest, Fifth Edition, NIH Publication 91-3242, Bethesda Md. (1991), vols. 1-3. In one embodiment, for the VL, the subgroup is subgroup kappa I as in Kabat et al., supra. In one embodiment, for the VH, the subgroup is subgroup III as in Kabat et al., supra.

[0103] A “humanized antibody” refers to an antibody comprising amino acid residues from non-human CDRs and amino acid residues from human FRs. In certain embodiments, a humanized antibody will comprise substantially all of at least one, and typically two, variable domains, in which all or substantially all of the (e.g., CDRs) correspond to those of a non-human antibody, and all or substantially all of the FRs correspond to those of a human antibody. A humanized antibody optionally may comprise at least a portion of an antibody constant region derived from a human antibody. A humanized form of an antibody, e.g., a non-human antibody, refers to an antibody that has undergone humanization.

[0104] An “immunoconjugate” is an antibody conjugated to one or more heterologous molecule(s), including but not limited to a cytotoxic agent.

[0105] A “subject” or an “individual” is a mammal. Mammals include, but are not limited to, domesticated animals (e.g., cows, sheep, cats, dogs, and horses), primates (e.g., humans and non-human primates such as monkeys), rabbits, and rodents (e.g., mice and rats). In certain embodiments, the subject or individual is a human.

[0106] An “isolated antibody” is one which has been separated from a component of its natural environment. In some embodiments, an antibody is purified to greater than 95% or 99% purity as determined by, for example, electrophoretic (e.g., SDS-PAGE, isoelectric focusing (IEF), capillary electrophoresis) or chromatographic (e.g., ion exchange or reverse phase HPLC). For review of methods for assessment of antibody purity, see, e.g., Flatman et al., J. Chromatogr. B 848:79-87 (2007).

[0107] An “isolated nucleic acid” refers to a nucleic acid molecule that has been separated from a component of its natural environment. An isolated nucleic acid includes a nucleic acid molecule contained in cells that ordinarily contain the nucleic acid molecule, but the nucleic acid molecule is present extrachromosomally or at a chromosomal location that is different from its natural chromosomal location.

[0108] The term “monoclonal antibody” or “mAb” as used herein refers to an antibody obtained from a population of substantially homogeneous antibodies, i.e., the individual antibodies comprising the population are identical and/or bind the same epitope, except for possible variant antibodies, e.g., containing naturally occurring mutations or arising during production of a monoclonal antibody preparation, such variants generally being present in minor amounts. In contrast to polyclonal antibody preparations, which typically include different antibodies directed against different determinants (epitopes), each monoclonal antibody of a monoclonal antibody preparation is directed against a single determinant on an antigen. Thus, the modifier “monoclonal” indicates the character of the antibody as being obtained from a substantially homogeneous population of antibodies, and is not to be construed as requiring production of the antibody by any particular method. For example, the monoclonal antibodies to be used in accordance with the present invention may be made by a variety of techniques, including but not limited to the hybridoma method, recombinant DNA methods, phage-display methods, and methods utilizing transgenic animals containing all or part of the human immunoglobulin loci, such methods and other exemplary methods for making monoclonal antibodies being described herein.

[0109] The term “pharmaceutical formulation” or “pharmaceutical composition” refers to a preparation which is in such form as to permit the biological activity of an active ingredient contained therein, such as the inventive CD3 binding domains and antibodies comprsising them, to be effective, and which contains no additional components which are unacceptably toxic to a subject to which the formulation would be administered.

[0110] A “pharmaceutically acceptable carrier” refers to an ingredient in a pharmaceutical formulation, other than an active ingredient, which is nontoxic to a subject. A pharmaceutically acceptable carrier includes, but is not limited to, a buffer, excipient, stabilizer, or preservative.

[0111] By the phrase “therapeutically effective amount” is meant an amount that produces the desired effect for which it is administered. The exact amount will depend on the purpose of the treatment, and will be ascertainable by one skilled in the art using known techniques (see, for example, Lloyd (1999) The Art, Science and Technology of Pharmaceutical Compounding).

[0112] An “immune response” or “immunological response” as used herein, in a subject refers to the development of a humoral immune response, a cellular-immune response, or a humoral and a cellular immune response to an antigen/immunogen. A “humoral immune response” refers to one that is at least in part mediated by antibodies. A “cellular immune response” is one mediated by T-lymphocytes or other white blood cells or both, and includes the production of cytokines, chemokines and similar molecules produced by activated T-cells, white blood cells, or both. Immune responses can be determined using standard immunoassays and neutralization assays, which are known in the art.

[0113] “Immunogenicity”, as used herein, refers to the capability of a protein or polypeptide to elicit an immune response directed specifically against a bacteria or virus that causes the identified disease.

[0114] As used herein, “treatment” (and grammatical variations thereof such as “treat” or “treating”) refers to clinical intervention in an attempt to alter the natural course of the individual being treated, and can be performed either for prophylaxis or during the course of clinical pathology. Desirable effects of treatment include, but are not limited to, preventing occurrence or recurrence of disease, alleviation of symptoms, diminishment of any direct or indirect pathological consequences of the disease, preventing metastasis, decreasing the rate of disease progression, amelioration or palliation of the disease state, and remission or improved prognosis. In some embodiments, antibodies of the invention are used to delay development of a disorder or disease or to slow the progression of a disorder or disease.

[0115] As used herein, “delaying progression” of a disorder or disease means to defer, hinder, slow, retard, stabilize, and/or postpone development of the disease or disorder (e.g., a cell proliferative disorder, e.g., cancer). This delay can be of varying lengths of time, depending on the history of the disease and/or individual being treated. As is evident to one skilled in the art, a sufficient or significant delay can, in effect, encompass prevention, in that the individual does not develop the disease. For example, a late stage cancer, such as development of metastasis, may be delayed.

[0116] By “reduce” or “inhibit” is meant the ability to cause an overall decrease, for example, of 20% or greater, of 50% or greater, or of 75%, 85%, 90%, 95%, or greater. In certain embodiments, reduce or inhibit can refer to the effector function of an antibody that is mediated by the antibody Fc region, such effector functions specifically including complement-dependent cytotoxicity (CDC), antibody-dependent cellular cytotoxicity (ADCC), and antibody-dependent cellular phagocytosis (ADCP).

[0117] As used herein, the terms “prevent,” “preventing,” and “prevention” refer to the prevention or inhibition of the development or onset of a disorder or disease.

[0118] As used herein, the terms “ameliorate” and “alleviate” refer to a reduction or diminishment in the severity a condition or any symptoms thereof.

[0119] The term “antibody” herein is used in the broadest sense and encompasses various antibody structures, including but not limited to monoclonal antibodies, polyclonal antibodies, multispecific antibodies (e.g., bispecific antibodies), and antibody fragments so long as they exhibit the desired antigen-binding activity. With regard to multispecific antibodies, such antibodies comprise at least two different antigen binding domains which recognized and specifically bind to at least two different antigens. With regard to bispecific antibodies, such antibodies comprise two different antigen binding domains which recognized and specifically bind to at least two different antigens. A “different antigen” or “different antigens” may refer to different and/or distinct proteins, polypeptides, or molecules; as well as different and/or distinct epitopes, which epitopes may be contained within one protein, polypeptide, or other molecule. Unless specifically indicated otherwise, the term “antibody,” as used herein, shall also be understood to encompass, in addition to the above, antibody molecules comprising two immunoglobulin heavy chains and two immunoglobulin light chains (i.e., “full antibody molecules”) as well as antigen-binding fragments thereof. The terms “antigen-binding portion” of an antibody, “antigen-binding fragment” of an antibody, and the like, as used herein, include any naturally occurring, enzymatically obtainable, synthetic, or genetically engineered polypeptide or glycoprotein that specifically binds an antigen to form a complex.

[0120] An “antibody” and “antibodies” may also refer to immunoglobulin molecules comprised of four polypeptide chains, two heavy (H) chains and two light (L) chains interconnected by disulfide bonds (i.e., “full antibody molecules”), as well as multimers thereof (e.g. IgM) or antigen-binding fragments thereof. Each heavy chain is comprised of a heavy chain variable region (“VH”) and a heavy chain constant region (comprised of domains C_{H}1, C_{H}2 and C_{H}3). Each light chain is comprised of a light chain variable region (“VL”) and a light chain constant region (“CL”). The V_{H} and V_{L} regions can be further subdivided into regions of hypervariability, termed complementarity determining regions (CDR), interspersed with regions that are more conserved, termed framework regions (FR). Each V_{H} and V_{L} is composed of three CDRs and four FRs, arranged from amino-terminus to carboxy-terminus in the following order: FR1, CDR1, FR2, CDR2, FR3, CDR3, FR4. In certain embodiments of the invention, the FRs of the antibody (or antigen binding fragment thereof) may be identical to the human germline sequences, or may be naturally or artificially modified. An amino acid consensus sequence may be defined based on a side-by-side analysis of two or more CDRs. Accordingly, the CDRs in a heavy chain are designated “CHRH1”, “CDRH2”, and “CDRH3”, respectively, and the CDRs in a light chain are designated “CDRL1”, “CDRL2”, and “CDRL3”.

[0121] An “antibody fragment” refers to a molecule other than an intact antibody that comprises a portion of an intact antibody that binds the antigen to which the intact antibody binds. Examples of antibody fragments include but are not limited to Fv, Fab, Fab′, Fab′-SH, F(ab′) 2; diabodies; linear antibodies; single-chain antibody molecules (e.g. scFv); and multispecific antibodies formed from antibody fragments.

[0122] By “binding domain” or “antigen binding domain” is meant a part of an antibody, compound, or a molecule that specifically binds to a target epitope, antigen, ligand, or receptor. Binding domains include but are not limited to antibodies (e.g., monoclonal, polyclonal, recombinant, humanized, and chimeric antibodies), antibody fragments or portions thereof (e.g., Fab fragments, Fab′₂, scFv antibodies, Fv fragments, SMIP, domain antibodies, diabodies, minibodies, scFv-Fc, affibodies, nanobodies, and VH and/or VL domains of antibodies), receptors, ligands, aptamers, and other molecules having an identified binding partner.

[0123] An “affinity matured antibody” refers to an antibody with one or more alterations in one or more complementary determining regions (CDRs), compared to a parent antibody which does not possess such alterations, such alterations resulting in an improvement in the affinity of the antibody for antigen. Substitution of one or more CDR residues or omission of one or more CDRs is also possible. Antibodies have been described in the scientific literature in which one or two CDRs can be dispensed with for binding. Padlan et al. (1995 FASEB J. 9:133-139) analyzed the contact regions between antibodies and their antigens, based on published crystal structures, and concluded that only about one fifth to one third of CDR residues actually contact the antigen. Padlan also found many antibodies in which one or two CDRs had no amino acids in contact with an antigen (see also, Vajdos et al. 2002 J Mol Biol 320:415-428). CDR residues not contacting antigen can be identified based on previous studies (for example residues H60-H65 in CDRH2 are often not required), from regions of Kabat CDRs lying outside Chothia CDRs, by molecular modeling and/or empirically. If a CDR or residue(s) thereof is omitted, it is usually substituted with an amino acid occupying the corresponding position in another human antibody sequence or a consensus of such sequences. Positions for substitution within CDRs and amino acids to substitute can also be selected empirically.

[0124] Fully human monoclonal antibodies as disclosed herein may comprise one or more amino acid substitutions, insertions and/or deletions in the framework and/or CDR regions of the heavy and light chain variable domains as compared to the corresponding germline sequences. Such mutations can be readily ascertained by comparing the amino acid sequences disclosed herein to germline sequences available from, for example, public antibody sequence databases. The present invention includes antibodies, and antigen-binding fragments thereof, which are derived from any of the amino acid sequences disclosed herein, wherein one or more amino acids within one or more framework and/or CDR regions are mutated to the corresponding residue(s) of the germline sequence from which the antibody was derived, or to the corresponding residue(s) of another human germline sequence, or to a conservative amino acid substitution of the corresponding germline residue(s) (such sequence changes are referred to herein collectively as “germline mutations”). A person of ordinary skill in the art, starting with the heavy and light chain variable region sequences disclosed herein, can easily produce numerous antibodies and antigen-binding fragments which comprise one or more individual germline mutations or combinations thereof. In certain embodiments, all of the framework and/or CDR residues within the V_{H} and/or V_{L} domains are mutated back to the residues found in the original germline sequence from which the antibody was derived. In other embodiments, only certain residues are mutated back to the original germline sequence, e.g., only the mutated residues found within the first 8 amino acids of FR1 or within the last 8 amino acids of FR4, or only the mutated residues found within CDR1, CDR2 or CDR3. In other embodiments, one or more of the framework and/or CDR residue(s) are mutated to the corresponding residue(s) of a different germline sequence (i.e., a germline sequence that is different from the germline sequence from which the antibody was originally derived). Furthermore, the antibodies of the present invention may contain any combination of two or more germline mutations within the framework and/or CDR regions, e.g., wherein certain individual residues are mutated to the corresponding residue of a particular germline sequence while certain other residues that differ from the original germline sequence are maintained or are mutated to the corresponding residue of a different germline sequence. Once obtained, antibodies and antigen-binding fragments that contain one or more germline mutations can be easily tested for one or more desired property such as, improved binding specificity, increased binding affinity, improved or enhanced antagonistic or agonistic biological properties (as the case may be), reduced immunogenicity, etc. Antibodies and antigen-binding fragments obtained in this general manner are encompassed within the present invention.

[0125] The present invention also includes fully monoclonal antibodies comprising variants of any of the CDR amino acid sequences disclosed herein having one or more conservative substitutions. For example, the present invention includes antibodies having CDR amino acid sequences with, e.g., 10 or fewer, 8 or fewer, 6 or fewer, 4 or fewer, etc. conservative amino acid substitutions relative to any of the CDR amino acid sequences disclosed herein.

[0126] The terms “anti-CD3 antibody”, “anti-CD3 binding domain-comprising antibody”, “an antibody that binds to CD3”, “a CD3 binding domain”, “an antibody comprising a CD3 binding domain”, and the like refer to an antibody (or a CD3 binding domain) that is capable of binding CD3 with sufficient affinity and/or specificity such that the antibody is useful as a diagnostic and/or therapeutic agent in targeting CD3. In one embodiment, the extent of binding of an anti-CD3 antibody to an unrelated, non-CD3 protein is less than about 10% of the binding of the antibody to CD3 as measured, e.g., by one of a variety of solution and surface based affinity measurement methodologies and instrumentation, such as, e.g., biolayer interferometry (BLI), surface plasmon resonance (SPR), solution equilibrium based kinetic exclusion assays, KinExA direct association, assays using FORTEBIO instruments and reagents, such as Octet RED 384 and HTX BLI-based instruments, enzyme-linked immunosorbent assays (ELISA), and radioimmunoassay (RIA) (see, e.g., Estep et al, MAbs, Vol. 5, pages 270-278 (2013); Yu et al., J Biomol Screen, Vol. 21, pages 88-95 (2016)). In certain embodiments, an antibody that binds to CD3 has a dissociation constant (Kd) of <1 mM, <100 nM, <10 nM, <1 nM, <0.1 nM, <0.01 nM, or <0.001 nM (e.g. 10⁻⁸ M or less, e.g. from 10⁻⁸ M to 10⁻¹³ M, e.g., from 10⁻⁹ M to 10⁻¹³ M). In certain embodiments, an anti-CD3 antibody binds to an epitope of CD3 that is conserved among CD3 from different species.

[0127] The term “developable” refers to extent to which one or more polypeptides in a plurality of polypeptides possess desirable characteristics, such as, e.g.: desirable expression, for example, in mammalian cells; solubility; viscosity; aggregation; chemical and/or physical stability; desirable “shelf-life”; melting temperature; pharmacokinetic profiles; circulation half-life; and clearance characteristics. Such characteristics may serve as indicia, independently, as combinations of sub-sets of such indicia, or in totality, for the likelihood that such one or more polypeptides may be successfully developed as a therapeutic candidate, and ultimately an approved drug. Accordingly, as understood in the art, generally, polypeptides with desirable developability characteristics possess, e.g., relatively high solubility, relatively low viscosity, relatively low propensity for aggregation, relatively high chemical stability, relatively high physical stability, relatively long “shelf life”, relatively high melting temperature, relatively long circulation half-life, relatively long clearance time, and the like. Polypeptides with undesirable developability characteristics possess, e.g., relatively low solubility, relatively high viscosity, relatively high propensity for aggregation, relatively poor chemical stability, relatively poor physical stability, relatively short “shelf life”, relatively low melting temperature, relatively short circulation half-life, relatively short clearance time, and the like.

[0128] Methods and assays which may be employed to ascertain the degree to which polypeptides, such as the inventive CD3 binding domains and antibodies comprising them, possess such desirable (or undesirable, as the case may be) developability characteristics are available in the art, and include, for example; those disclosed in WO 2014/179363 and Xu et al., Protein Eng Des Sol, Vol. 26, pages 663-670 (2013); SMP and SCP assays and the like cross interaction chromatography (CIC); self-interaction chromatography (SIC); dynamic light scattering; size exclusion chromatography (SEC), dynamic light scattering (DLS) spectroscopy; photon correlation spectroscopy; quasi-elastic light scattering, circular dichroism (CD), viscosity measurements; whole cell binding; tissue micro array methodologies; BVP ELISA assays; AC-SINS assays (Liu et al; MAbs, Vol. 6, pages 483-492 (2014); differential scanning calorimetry; and the like (see, e.g., He et al., J. Pharm. Sci., Vol. 100(4), pp. 1330-1340 (2011); Wagner et al., Pharm. Develop. & Technol (posted online 2012; hyper-text transfer protocol: informahealthcare.com/doi/abs/10.3109/10837450.2011.649851); Hotzel et al., mAbs, Vol. 4(6), pages 753-7601 (2012); Weiqiang et al., J. Pharm. Sci., Vol. 101(5), pp. 1701-1720 (2012); Banks et al., J. Pharm. Sci., Vol. 101(8), pp. 2720-2732 (2012); Lie et al., J. Pharm. Sci., Vol. 94(9), pp. 1928-1948 (2005); and Payne et al., Biopolymers, Vol. 85(5), pp. 527-533 (2006)).

[0129] Furthermore polypeptides, such as the inventive CD3 binding domains and antibodies comprising them selected or identified as possessing enhanced developability are referred to as “developable”. Polypeptides that are detected in accordance with the disclosed and claimed methods as possessing decreased developability are so detected by virtue of their interaction with the disclosed and claimed PSRs, and as such are referred to as “polyspecific” polypeptides. Such polyspecific polypeptides are further referred to as relatively “undevelopable” or relatively “non-developable” polypeptides.

[0130] Any means for detecting an interaction between one or more polypeptides and a moiety with which the one or more polypeptide interacts may be employed in accordance with the disclosed and claimed methods. Exemplary such means include, e.g.: flow cytometry; magnetic-activated cell sorting (MAGS); fluorescence assisted cell sorting (FACS); immunohistochemistry; column and/or affinity chromatography or separations; sedimentation methodologies (e.g., centrifugation); immunoprecipitation; two-hybrid assays, such as mammalian two-hybrid assays and yeast two-hybrid assays; fluorescence resonance energy transfer (FRET) assays; affinity chromatography; and the like. In certain embodiments detecting such an interaction comprises employing magnetic-activated cell sorting (MAGS); fluorescence assisted cell sorting (FACS); and/or combinations of magnetic-activated cell sorting (MAGS) and fluorescence assisted cell sorting (FACS).

[0131] A “developability score” also known as a “developability profile”, refers to an index that may be assigned to the inventive CD3 binding domains and/or antibodies comprising them upon assessing developability as described herein and in, e.g., WO 2014/179363 and Xu et al., Protein Eng Des Sol, Vol. 26, pages 663-670 (2013). The developability score is thus a measure or metric by which developability of CD3 binders and/or antibodies comprising them may be assessed, compared, and/or ranked. Such developability scores serve as a measure of the degree of interaction of CD3 binders and antibodies comprising them. The degree of interaction may be assessed by any number of means available in the art that provides an output value that correlates with a strength or affinity of a polypeptide for a moiety to which it is bound. Exemplary such means include flow cytometry means, such as FACS; ELISA; quantitative immunoaffinity assays or immunoprecipitation assays; mammalian two-hybrid or yeast two-hybrid assays, and the like. In the context of FACS, as demonstrated in the Examples, a degree of interaction between polypeptides in the plurality and the PSR may be ascertained by generating a mean fluorescence intensity (MFI) for each polypeptide-PSR interaction that is detected, and then ordering the MFI in either ascending or descending order, thereby ranking the polypeptides in the plurality according to the relative degree of interaction between each detected polypeptide and the PSR. Such a ranking provides for a ranking of polypeptides of the plurality such that those polypeptides possessing enhanced developability are readily ascertained, as are those polypeptides possessing decreased developability. In certain embodiments, an MFI of 500 or less is demonstrative of a polypeptide possessing enhanced developability. In certain embodiments, an MFI of 400 or less is demonstrative of a polypeptide possessing enhanced developability. In certain embodiments, an MFI of 300 or less is demonstrative of a polypeptide possessing enhanced developability. In certain embodiments, an MFI of 200 or less is demonstrative of a polypeptide possessing enhanced developability. In certain embodiments, an MFI of 100 or less is demonstrative of a polypeptide possessing enhanced developability. In certain embodiments, an MFI of 1000 or more is demonstrative of polypeptide possessing decreased developability. In certain embodiments, an MFI of 900 or more is demonstrative of polypeptide possessing decreased developability. In certain embodiments, an MFI of 800 or more is demonstrative of polypeptide possessing decreased developability. In certain embodiments, an MFI of 700 or more is demonstrative of polypeptide possessing decreased developability. In certain embodiments, an MFI of 600 or less is demonstrative of a polypeptide possessing decreased developability.

[0132] A developability score may also take the form of a normalized score, for example, on a scale of 0.0 to 1.0, in which the score of one or more test CD3 binders and/or antibodies comprising them are normalized to the developability score determined by performing the assay with a standard, or control, polypeptide or antibody. An exemplary such standard or control antibody may comprise, e.g., a hen egg lysozyme-binding (HEL) antibody, such as ADI-03847.

[0133] The terms “cytokine release syndrome”, “cytokine release crisis”, or “cytokine storm” refers to a pro-inflammatory, positive feedback loop between cytokines and immune cells leading to excessive or uncontrolled release of pro-inflammatory cytokines by cells within immune system (e.g., T cells) (see, e.g., Lee et al., Blood, Vol. 124, pages 188-195 (2014) and Tisoncik et al., Microbiol Mol Biol Rev, Vol. 76, pages 16-32 (2012). Without wishing to be bound by any theory, it is believed that upon stimulation and activation, the immune cells (e.g., T cells) release a series of cytokines to a level and degree that generates untoward biological/physiological effects or varying degree and severity, including acute inflammation characterized by, e.g., rubor (redness), swelling or edema, calor (heat), dolor (pain), and “functio laesa” (loss of function); when localized in skin or other tissue: increase blood flow, enabling vascular leukocytes and plasma proteins to reach extravascular sites of injury, increasing local temperatures and generation of pain, tissue edema and extravascular pressure and a reduction in tissue perfusion; organ and system dysfunction, such as cardiac dysfunction, adult respiratory distress syndrome, neurologic toxicity, renal and/or hepatic failure, and disseminated intravascular coagulation. Although numerous cytokines appear to associate with onset of CRS, elevated levels of IFNγ, IL-6, TNFα, TGFbeta, IL-2, granulocyte macrophage-colony-stimulating factor (GM-CSF), IL-10, IL-8, L-5, and/or fractalkine are implicated as predictive and/or causative of CRS or the propensity to elicit CRS upon T-cell stimulation. In certain embodiments of the invention, elevated levels of Interleukin 6 (IL-6); Interleukin 12 (IL-12); tumor necrosis factor alpha (TNFa); (TGFb); Interleukin-2 (IL-2); and/or interferon gamma (IFNg) production by T-cells incubated with the CD3 binding domains and antibodies comprising them are predictive of the propensity to elicit CRS. In certain embodiments of the invention, elevated levels interferon gamma (IFNg) production by T-cells incubated with the CD3 binding domains and antibodies comprising them are predictive of the propensity to elicit CRS.

[0134] A “cytokine release syndrome risk score”, also known as a “cytokine release syndrome risk profile”, “CRS risk score”, or “CRS risk profile”, refers to an index that may be assigned to the inventive CD3 binding domains and/or antibodies comprising them upon assessing the propensity to elicit cytokine production levels from T cells incubated or contacted with the inventive CD3 binding domains (and/or antibodies comprising them) to levels that would be predicted or expected, and/or in fact demonstrated, to be sufficient to induce cytokine release syndrome in subjects. The developability score is thus a measure or metric by which CRS risk of CD3 binders and/or antibodies comprising them may be assessed, compared, and/or ranked. Such CRS risk scores serve as a measure of the propensity, either predictive or demonstrative, of CD3 binders and antibodies comprising them to elicit cytokine release when assessed in either an in vitro (e.g., cell-based) or an in vivo (e.g., in a test subject or patient) cytokine release assay. Such assays are available to the artisan and include, in certain embodiments of the invention e.g., the use of PBMCs, either as cultured cell lines or as primary cells obtained from living donors, to assess the ability of immunomodulatory agents, such as CD3 binding domains and antibodies comprising them, to induce cytokine production/secretion in cell-based cytokine release assays performed in immobilized or, preferably soluble antibody formats (see, e.g., Vessillier et al., J Immunol Methods, Vol. 424, pages 43-52 (2015). Generally, production levels of cytokines that are measured as indicators or predictive of CRS risk, as understood by the artisan and/or as disclosed therein and throughout, that are lower for test molecules than that determined for known (i.e., “positive control”) inducers of cytokine release syndrome or cytokine storm are indicative of diminished risk of inducing CRS by the test inducers.

[0135] The term “recombinant” generally refers to any protein, polypeptide, or cell expressing a gene of interest that is produced by genetic engineering methods. The term “recombinant” as used with respect to a protein or polypeptide, means a polypeptide produced by expression of a recombinant polynucleotide. The proteins used in the immunogenic compositions of the invention may be isolated from a natural source or produced by genetic engineering methods.

[0136] The antibodies of the invention may, in some embodiments, be recombinant human antibodies. The term “recombinant human antibody”, as used herein, is intended to include all antibodies, including human or humanized antibodies, that are prepared, expressed, created or isolated by recombinant means, such as antibodies expressed using a recombinant expression vector transfected into a host cell (described further below), antibodies isolated from a recombinant, combinatorial human antibody library (described further below), antibodies isolated from an animal (e.g., a mouse) that is transgenic for human immunoglobulin genes (see e.g., Taylor et al. (1992) Nucl. Acids Res. 20:6287-6295) or antibodies prepared, expressed, created or isolated by any other means that involves splicing of human immunoglobulin gene sequences to other DNA sequences. Such recombinant human antibodies have variable and constant regions derived from human germline immunoglobulin sequences. In certain embodiments, however, such recombinant human antibodies are subjected to in vitro mutagenesis (or, when an animal transgenic for human Ig sequences is used, in vivo somatic mutagenesis) and thus the amino acid sequences of the V_{H} and V_{L} regions of the recombinant antibodies are sequences that, while derived from and related to human germline V_{H} and V_{L} sequences, may not naturally exist within the human antibody germline repertoire in vivo.

[0137] The term “specifically binds,” or “binds specifically to”, or the like, means that an antibody or antigen-binding fragment thereof forms a complex with an antigen that is relatively stable under physiologic conditions. Specific binding can be characterized by an equilibrium dissociation constant of at least about 1 x10⁻⁶ M or less (e.g., a smaller K_{D} denotes a tighter binding). Methods for determining whether two molecules specifically bind are well known in the art and include, for example, equilibrium dialysis, surface plasmon resonance, and the like. As described herein, antibodies have been identified by surface plasmon resonance, e.g., BIACORE™, biolayer interferometry measurements using, e.g., a FORTEBIO Octet HTX instrument (Pall Life Sciences), which bind specifically to CD3. Moreover, multi-specific antibodies that bind to CD3 and one or more additional antigens, or a bi-specific that binds to two different regions of CD3 and/or different regions of an additional antigen are nonetheless considered antibodies that “specifically bind”, as used herein. In certain embodiments, the antibodies disclosed herein display equilibrium dissociation constants (and hence specificities) of about 1×10⁻⁶ M; about 1×10⁻⁷ M; about 1×10⁻⁸ M; about 1×10⁻⁹ M; about 1×10⁻¹⁰ M; between about 1×10⁻⁶ M and about 1×10⁻⁷ M; between about 1×10⁻⁷ M and about 1×10⁻⁸ M; between about 1×10⁻⁸ M and about 1×10⁻⁹ M; or between about 1×10⁻⁹ M and about 1×10⁻¹⁰ M.

[0138] The term “high affinity” antibody refers to those mAbs having a binding affinity to CD3, expressed as K_{D}, of at least 10⁻⁹ M; more preferably 10⁻¹⁰ M, more preferably 10⁻¹¹ M, more preferably 10⁻¹² M as measured by surface plasmon resonance, e.g., BIACOR, biolayer interferometry measurements using, e.g., a FORTEBIO Octet HTX instrument (Pall Life Sciences), or solution-affinity ELISA.

[0139] By the term “slow off rate”, is meant an antibody that dissociates from CD3, with a rate constant (K_{off} or K_{D}) of 1×10⁻³ s^{″1} or less, preferably 1×10⁻⁴ s^{″1} or less, as determined by surface plasmon resonance, e.g., BIACORE™ or a FORTEBIO Octet HTX instrument (Pall Life Sciences).

[0140] Further with regard to antibody fragments such antibody fragments may include a Fab fragment, a F(ab′)₂ fragment, a Fv fragment, a dAb fragment, a fragment containing a CDR, or an isolated CDR. Antigen-binding fragments of an antibody may be derived, e.g., from full antibody molecules using any suitable standard techniques such as proteolytic digestion or recombinant genetic engineering techniques involving the manipulation and expression of DNA encoding antibody variable and (optionally) constant domains. Such DNA is known and/or is readily available from, e.g., commercial sources, DNA libraries (including, e.g., phage-antibody libraries), or can be synthesized. The DNA may be sequenced and manipulated chemically or by using molecular biology techniques, for example, to arrange one or more variable and/or constant domains into a suitable configuration, or to introduce codons, create cysteine residues, modify, add or delete amino acids, etc.

[0141] Non-limiting examples of antigen-binding fragments include: (i) Fab fragments; (ii) F(ab′)₂ fragments; (iii) Fd fragments; (iv) Fv fragments; (v) single-chain Fv (scFv) molecules; (vi) dAb fragments; and (vii) minimal recognition units consisting of the amino acid residues that mimic the hypervariable region of an antibody (e.g., an isolated complementarity determining region (CDR) such as a CDR3 peptide), or a constrained FR3-CDR3-FR4 peptide. Other engineered molecules, such as domain-specific antibodies, single domain antibodies, domain-deleted antibodies, chimeric antibodies, CDR-grafted antibodies, diabodies, triabodies, tetrabodies, minibodies, nanobodies (e.g., monovalent nanobodies, bivalent nanobodies, etc.), small modular immunopharmaceuticals (SMIPs), and shark variable IgNAR domains, are also encompassed within the expression “antigen-binding fragment,” as used herein.

[0142] An antigen-binding fragment of an antibody will typically comprise at least one variable domain. The variable domain may be of any size or amino acid composition and will generally comprise at least one CDR, which is adjacent to or in frame with one or more framework sequences. In antigen-binding fragments having a V_{H} domain associated with a V_{L} domain, the V_{H} and V_{L} domains may be situated relative to one another in any suitable arrangement. For example, the variable region may be dimeric and contain V_{H}-V_{H}, V_{H}-V_{L} or V_{L}-V_{L} dimers. Alternatively, the antigen-binding fragment of an antibody may contain a monomeric V_{H} or V_{L} domain.

[0143] In certain embodiments, an antigen-binding fragment of an antibody may contain at least one variable domain covalently linked to at least one constant domain. Non-limiting, exemplary configurations of variable and constant domains that may be found within an antigen-binding fragment of an antibody of the present invention include: (i) V_{H}-C_{H}1; (ii) V_{H}-C_{H}2; (iii) V_{H}-C_{H}3; (iv) V_{H}-Cₕ1-Cₕ2; (V) V_{H}-Cₕ1-Cₕ2-Cₕ3; (vi) V_{H}-C_{H}2-C_{H}3; (vii) V_{H}-C_{L}; (viii) V_{L}-C_{H}1; (ix) V_{L}-C_{H}2; (x) V_{L}-C_{H}3; (xi) V_{L}-C_{H}1-C_{H}2; (xii) V_{L}-C_{H}1-C_{H}2-C_{H}3; (xiii) V_{L}-C_{H}2-C_{H}3; and (xiv) V_{L}-C_{L}. In any configuration of variable and constant domains, including any of the exemplary configurations listed above, the variable and constant domains may be either directly linked to one another or may be linked by a full or partial hinge or linker region. A hinge region may consist of at least 2 (e.g., 5, 10, 15, 20, 40, 60 or more) amino acids, which result in a flexible or semi-flexible linkage between adjacent variable and/or constant domains in a single polypeptide molecule. Moreover, an antigen-binding fragment of an antibody of the present invention may comprise a homo-dimer or hetero-dimer (or other multimer) of any of the variable and constant domain configurations listed above in non-covalent association with one another and/or with one or more monomeric V_{H} or V_{L} domain (e.g., by disulfide bond(s)).

[0144] As with full antibody molecules, antigen-binding fragments may be mono-specific or multi-specific (e.g., bi-specific). A multi-specific antigen-binding fragment of an antibody will typically comprise at least two different variable domains, wherein each variable domain is capable of specifically binding to a separate antigen or to a different epitope on the same antigen. Any multi-specific antibody format, including the exemplary bi-specific antibody formats disclosed herein, may be adapted for use in the context of an antigen-binding fragment of an antibody of the present invention using routine techniques available in the art. Non-limiting examples of multispecific and bispecific formats that re amenable to incorporation of the inventive anti-CD3 binding domains include, e.g., Fab-Fc-scFv (“bottle-opener”) (XENCOR), Mab-scFv (XENCOR), Mab-Fv (XENCOR), Dual scFv (XENCOR),central Fv (XENCOR), central scFv(XENCOR), one-arm central scFv (XENCOR), Fab-Fab (XENCOR), Fab-Fv (XENCOR), mAb-Fv (XENCOR), mAb-Fab (XENCOR), DART (MACROGENICS), BiTE (AMGEN/MICROMET), KiTE, common light chain-IgG (Genentech), TandAb (SFFIMED) Cross-Mab (ROCHE), SEED (EMD SERONO), BEAT (GLENMARK), TrioMab (TRION PHARMA/FRESENIUS BIOTECH), DuetMab (MEDIMMUNE), and others, as dislosed, e.g., in (WO 95/09917; WO 2008/119566; WO 2008/119567; WO2011/121110; WO 2010/037835; WO 2007/042261; WO 2007/110205; WO 2011/121110; WO 2012/055961; WO 2012/16067; WO 2016/086189; WO 2016/182751; WO 2015/006749; WO 2014/049003; WO 2013/177101; WO 2015/128509; U.S. Pat. No. 7,951,917; US 2009/0252729; US 2014/0348839; U.S. Pat. No. 7,183,076; Mazor et al., Mabs, Vol. 7, pages 377-389 (2015); Muda et al., Protein Engineering, Designe, & Selection, Vol. 24, pages 447-454 (2011); and Del Bano et al., Antibodies, Vol. 5, pages 1-23 (2016).

[0145] The specific embodiments, antibody or antibody fragments of the invention may be conjugated to a therapeutic moiety (“immunoconjugate”), such as an antibiotic, a second anti-CD3 antibody, a vaccine, or a toxoid, or any other useful therapeutic moiety.

[0146] An “isolated antibody”, as used herein, is intended to refer to an antibody that is substantially free of other antibodies (Abs) having different antigenic specificities (e.g., an isolated antibody that specifically binds CD3, or a fragment thereof, is substantially free of Abs that specifically bind antigens other than CD3.

[0147] A “blocking antibody” or a “neutralizing antibody”, as used herein (or an “antibody that neutralizes CD3 activity”), is intended to refer to an antibody whose binding to CD3, as the case may be as disclosed herein, results in inhibition of at least one biological activity of CD3.

[0148] The term “surface plasmon resonance”, as used herein, refers to an optical phenomenon that allows for the analysis of real-time biomolecular interactions by detection of alterations in protein concentrations within a biosensor matrix, for example using the BIACORE™ system (Pharmacia Biosensor AB, Uppsala, Sweden and Piscataway, N.J.).

[0149] The term “K_{D}”, as used herein, is intended to refer to the equilibrium dissociation constant of a particular antibody-antigen interaction.

[0150] The term “epitope” refers to an antigenic determinant that interacts with a specific antigen binding site in the variable region of an antibody molecule known as a paratope. A single antigen may have more than one epitope. Thus, different antibodies may bind to different areas on an antigen and may have different biological effects. The term “epitope” also refers to a site on an antigen to which B and/or T cells respond. It also refers to a region of an antigen that is bound by an antibody. Epitopes may be defined as structural or functional. Functional epitopes are generally a subset of the structural epitopes and have those residues that directly contribute to the affinity of the interaction. Epitopes may also be conformational, that is, composed of non-linear amino acids. In certain embodiments, epitopes may include determinants that are chemically active surface groupings of molecules such as amino acids, sugar side chains, phosphoryl groups, or sulfonyl groups, and, in certain embodiments, may have specific three-dimensional structural characteristics, and/or specific charge characteristics.

[0151] The term “substantial identity”, or “substantially identical,” when referring to a nucleic acid or fragment thereof, or an amino acid sequence or a fragment thereof, indicates that, when optimally aligned with appropriate insertions or deletions with another nucleic acid sequence or amino acid sequence, as the case may be, (or its complementary strand), there is sequence identity in at least about 100%, at least about 99%, at least about 98%, at least about 97%, at least about 96%, at least about 95%, at least about 94%, at least about 93%, at least about 92%, at least about 91%, at least about 90%, at least about 89%, at least about 88%, at least about 87%, at least about 86%, at about 85%, at least about 84%, at least about 83%, at least about 82%, at least about 80%, and optionally so on, as measured by any well-known algorithm of sequence identity, such as FASTA, BLAST or GAP, as discussed below. Accordingly, sequences that display a certain percentage “identity” share that percentage identity, and/or are that percentage “identical” to one another.

[0152] In certain embodiments, the disclosed CD3 binding domains, and/or the individual heavy chain (HC) sequence, light chain (LC) sequence, CDRH3 sequence, CDRH2 sequence, CHRH1 sequence, CDRL3 sequence, CDRL2 sequence, CDRL1 sequence, and/or framework sequences are independently at least about 100%, at least about 99%, at least about 98%, at least about 97%, at least about 96%, at least about 95%, at least about 94%, at least about 93%, at least about 92%, at least about 91%, at least about 90%, at least about 89%, at least about 88%, at least about 87%, at least about 86%, at about 85%, at least about 84%, at least about 83%, at least about 82%, at least about 80%; and/or all percentages of identity in between; to other sequences and/or share such percentage identities with one another (or with certain subsets of the herein-disclosed antibody sequences).

[0153] In certain embodiments, the disclosed antibody amino acid sequences are, e.g.; at least 70% identical; at least 75% identical; 80% identical; at least 85% identical; at least 90% identical; at least 95% identical; at least 96% identical; at least 97% identical; at least 98% identical; at least 99%; and/or all percentages of identity in between; to other sequences and/or share such percentage identities with one another (or with certain subsets of the herein-disclosed antibody sequences).

[0154] Preferably, residue positions, which are not identical, differ by conservative amino acid substitutions. A “conservative amino acid substitution” is one in which an amino acid residue is substituted by another amino acid residue having a side chain (R group) with similar chemical properties (e.g., charge or hydrophobicity). In general, a conservative amino acid substitution will not substantially change the functional properties of a protein. In cases where two or more amino acid sequences differ from each other by conservative substitutions, the percent or degree of similarity may be adjusted upwards to correct for the conservative nature of the substitution. Means for making this adjustment are well known to those of skill in the art. (See, e.g., Pearson (1994) Methods Mol. Biol. 24: 307-331). Examples of groups of amino acids that have side chains with similar chemical properties include 1) aliphatic side chains: glycine, alanine, valine, leucine and isoleucine; 2) aliphatic-hydroxyl side chains: serine and threonine; 3) amide-containing side chains: asparagine and glutamine; 4) aromatic side chains: phenylalanine, tyrosine, and tryptophan; 5) basic side chains: lysine, arginine, and histidine; 6) acidic side chains: aspartate and glutamate, and 7) sulfur-containing side chains: cysteine and methionine. Preferred conservative amino acids substitution groups are: valine-leucine-isoleucine, phenylalanine-tyrosine, lysine-arginine, alanine-valine, glutamate-aspartate, and asparagine-glutamine. Alternatively, a conservative replacement is any change having a positive value in the PAM250 log-likelihood matrix disclosed in Gonnet et al. (1992) Science 256: 1443 45. A “moderately conservative” replacement is any change having a nonnegative value in the PAM250 log-likelihood matrix.

[0155] Sequence similarity for polypeptides is typically measured using sequence analysis software. Protein analysis software matches similar sequences using measures of similarity assigned to various substitutions, deletions and other modifications, including conservative amino acid substitutions. For instance, GCG software contains programs such as GAP and BESTFIT which can be used with default parameters to determine sequence homology or sequence identity between closely related polypeptides, such as homologous polypeptides from different species of organisms or between a wild type protein and a mutein thereof. See, e.g., GCG Version 6.1. Polypeptide sequences also can be compared using FASTA with default or recommended parameters; a program in GCG Version 6.1. FASTA (e.g., FASTA2 and FASTA3) provides alignments and percent sequence identity of the regions of the best overlap between the query and search sequences (Pearson (2000) supra). Another preferred algorithm when comparing a sequence of the invention to a database containing a large number of sequences from different organisms is the computer program BLAST, especially BLASTP or TBLASTN, using default parameters. (See, e.g., Altschul et al. (1990) J. Mol. Biol. 215: 403 410 and (1997) Nucleic Acids Res. 25:3389 402).

[0156] In certain embodiments, the antibody or antibody fragment for use in the method of the invention may be mono-specific, bi-specific, or multi-specific. Multi-specific antibodies may be specific for different epitopes of one target polypeptide or may contain antigen-binding domains specific for epitopes of more than one target polypeptide. An exemplary bi-specific antibody format that can be used in the context of the present invention involves the use of a first immunoglobulin (Ig) C_{H}3 domain and a second Ig C_{H}3 domain, wherein the first and second Ig C_{H}3 domains differ from one another by at least one amino acid, and wherein at least one amino acid difference reduces binding of the bi-specific antibody to Protein A as compared to a bi-specific antibody lacking the amino acid difference. In one embodiment, the first Ig C_{H}3 domain binds Protein A and the second Ig C_{H}3 domain contains a mutation that reduces or abolishes Protein A binding such as an H95R modification (by IMGT exon numbering; H435R by EU numbering). The second C_{H}3 may further comprise an Y96F modification (by IMGT; Y436F by EU). Further modifications that may be found within the second C_{H}3 include: D16E, L18M, N44S, K52N, V57M, and V82I (by IMGT; D356E, L358M, N384S, K392N, V397M, and V422I by EU) in the case of IgG1 mAbs; N44S, K52N, and V82I (IMGT; N384S, K392N, and V422I by EU) in the case of IgG2 mAbs; and Q15R, N44S, K52N, V57M, R69K, E79Q, and V82I (by IMGT; Q355R, N384S, K392N, V397M, R409K, E419Q, and V422I by EU) in the case of IgG4 mAbs. Variations on the bi-specific antibody format described above are contemplated within the scope of the present invention.

[0157] Exemplary Anti-CD3 Binding Domains and Antibodies Comprising them

[0158] As mentioned above, in certain embodiments of the invention a large series of CD3 binding domains and antibodies comprising them, and methods of preparing and using them are provided. Surprisingly, species of this large series of CD3 binding domains collectively display desirable properties, including, e.g., a broad range of affinities for CD3 epsilon; cross-reactivity towards both human CD3 (“Hu CD3”) and cynomolgus CD3 (“Cy CD3”); as well as desirable developability profiles and/or cytokine release syndrome (CRS) risk profiles. In certain embodiments, the inventive CD3 binding domains, and antibodies comprising them, display developability profiles and/or CRS risk profiles that are superior to the developability profiles and/or CRS risk profiles of other anti-CD3 antibodies. In certain embodiments, the inventive CD3 binding domains, and antibodies comprising them, display developability profiles and/or CRS risk profiles that are superior to the developability profiles and/or CRS risk profiles of, e.g., 12C; SP34; 38E4; CAB21609_A01, CAB21609_B01, CAB21609_C01, and/or CAB21609_D01 as disclosed herein as well as in Yang et al., J Immunol, Vol 137, pages 1097-1100 (Aug. 4, 1986); US 2014/008295; and WO 2015/095392.

[0159] In certain embodiments, the invention provides CD3 binding domains and antibodies comprising them that bind to CD3 (e.g., CD3c and/or CD3γ).

[0160] In certain embodiments, the inventive CD3 binding domains and antibodies comprising them are provided which display an enhanced developability profile relative to other CD3 binding domains (or antibodies comprising them). In certain embodiments, the inventive CD3 binding domains and antibodies comprising them are provided which display an enhanced developability profile relative to one or more of: trastuzumab; (Herceptin®); lintuzumab; blinatumomab (Blincyto®); and Mab 364, Mab 366, Mab 367, Mab 368, Mab 369, Mab 370, or Mab 22, as provided in Table 2.

[0161] In certain embodiments, the inventive CD3 binding domains and antibodies comprising them display a developability score of: between about 0 MFI and about 500 MFI; between about 0 MFI and about 450 MFI; between about 0 MFI and about 400 MFI; between about 0 MFI and about 350 MFI; between about 0 MFI and about 300 MFI; between about 0 MFI and about 250 MFI; between about 0 MFI and about 200 MFI; between about 0 MFI and about 150 MFI; between about 0 MFI and about 100 MFI; between about 0 MFI and about 50 MFI; between about 200 MFI and 500 MFI; between about 200 MFI and about 450 MFI; between about 200 MFI and about 400 MFI; between about 200 MFI and about 350 MFI; between about 200 MFI and about 300 MFI; between about 200 MFI and about 250 MFI; between about 100 MFI and about 450 MFI; between about 100 MFI and about 400 MFI; between about 100 MFI and about 350 MFI; between about 100 MFI and about 300 MFI; between about 100 MFI and about 250 MFI; between about 100 MFI and about 200 MFI; or between about 100 MFI and about 150 MFI.

[0162] In other embodiments, the inventive CD3 binders and antibodies comprising them display a normalized developability score of between about 0.0 and about 0.6; between about 0.0 and about 0.57; between about 0.0 and about 0.55; between about 0.0 and about 0.53; between about 0.0 and about 0.51; between about 0.0 and about 0.49; between about 0.0 and about 0.47; between about 0.0 and about 0.45; between about 0.0 and about 0.43; between about 0.0 and about 0.41; between about 0.0 and about 0.39; between about 0.0 and about 0.37; between about 0.0 and about 0.35; between about 0.0 and about 0.33; between about 0.0 and about 0.31; between about 0.0 and about 0.29; between about 0.0 and about 0.27; between about 0.0 and about 0.25; between about 0.0 and about 0.23; between about 0.0 and about 0.21; between about 0.0 and about 0.19; between about 0.0 and about 0.17; between about 0.0 and about 0.15; between about 0.0 and about 0.13; between about 0.0 and about 0.11; between about 0.0 and about 0.09; between about 0.0 and about 0.07; or between about 0.0 and about 0.05.

[0163] In certain embodiments, the developability profile and/or developability score for the inventive CD3 binders and antibodies comprising them is obtained by performing a PSR assay; an SCP assay; AS-CINS; a BVP assay; an ELISA; a DSF assay; a Tm assay; a HIC assay; a CIC assay; or combinations thereof.

[0164] In other embodiments, the inventive CD3 binding domains and antibodies comprising them elicit potent T cell activation or T cell killing while displaying a decreased propensity to elicit cytokine production to levels capable of inducing cytokine release syndrome. In certain embodiments, at least one cytokine for which cytokine production levels are measured in order to assess the propensity to elicit cytokine production levels capable of inducing cytokine release syndrome is selected from the group consisting of: Interleukin 6 (IL-6); Interleukin 12 (IL-12); tumor necrosis factor alpha (TNFα); (TGFb); Interleukin-2 (IL-2); and Interferon gamma (IFNg).

[0165] In certain embodiments, the inventive CD3 binding domains and antibodies comprising them elicit T cell activation or T cell killing while displaying a decreased propensity to elicit cytokine production to levels capable of inducing cytokine release relative to that observed one or more of: trastuzumab; (Herceptin®); lintuzumab; blinatumomab (Blincyto®); and Mab 364, Mab366, Mab 367, Mab 368, Mab 369, Mab 370, or Mab 22, as provided in Table 2. In certain embodiments, at least one cytokine for which cytokine production levels are measured in order to assess the propensity to elicit cytokine production levels capable of inducing cytokine release syndrome is selected from the group consisting of: Interleukin 6 (IL-6); Interleukin 12 (IL-12); tumor necrosis factor alpha (TNFα); (TGFb); Interleukin-2 (IL-2); and Interferon gamma (IFNg).

[0166] In certain embodiments, the inventive CD3 binding domains and antibodies comprising them display a cytokine release syndrome risk profile that is indicative of decreased risk of eliciting cytokine release syndrome (CRS). In other embodiments, the inventive CD3 binding domains and antibodies comprising them display a cytokine release syndrome risk profile that is indicative of decreased risk of eliciting cytokine release syndrome (CRS) when compared to the cytokine release syndrome risk profile assessed for one or more of: trastuzumab; (Herceptin®); lintuzumab; blinatumomab (Blincyto®); and Mab 364, Mab366, Mab 367, Mab 368, Mab 369, Mab 370, or Mab 22, as provided in Table 2.

[0167] In certain embodiments, the invention provides an antibody comprising a CDRH3 that is: 100% identical to; at least 99% identical to; at least 98% identical to; at least 97% identical to; at least 96% identical to; at least 95% identical to; at least 94% identical to; at least 93% identical to; at least 92% identical to; at least 91% identical to; at least 90% identical to; at least 89% identical to; at least 88% identical to; at least 87% identical to; at least 86% identical to; at least 85% identical to; at least 84% identical to; at least 83% identical to; at least 82% identical to; or at least 80% identical to; a CDRH3 selected from the group consisting of the CDRH3s of Mabs 1 through 21, 23 through 222, 224 through 363, and 371 through 405 as provided in Table 2; with the proviso that the CDRH3 is not 100% identical to the CDRH3 of any of Mabs 223, 364, 365, 366, 367, 368, 369, or 370 as provided in Table 2.

[0168] In certain embodiments, the invention provides an antibody comprising a CDRH2 that is: 100% identical to; at least 99% identical to; at least 98% identical to; at least 97% identical to; at least 96% identical to; at least 95% identical to; at least 94% identical to; at least 93% identical to; at least 92% identical to; at least 91% identical to; at least 90% identical to; at least 89% identical to; at least 88% identical to; at least 87% identical to; at least 86% identical to; at least 85% identical to; at least 84% identical to; at least 83% identical to; at least 82% identical to; or at least 80% identical to; a CDRH2 selected from the group consisting of the CDRH2s of Mabs 1 through 21, 23 through 222, 224 through 363, and 371 through 405 as provided in Table 2; with the proviso that the CDRH2 is not 100% identical to the CDRH2 of any of Mabs 223, 364, 365, 366, 367, 368, 369, or 370 as provided in Table 2.

[0169] In certain embodiments, the invention provides an antibody comprising a CDRH1 that is: 100% identical to; at least 99% identical to; at least 98% identical to; at least 97% identical to; at least 96% identical to; at least 95% identical to; at least 94% identical to; at least 93% identical to; at least 92% identical to; at least 91% identical to; at least 90% identical to; at least 89% identical to; at least 88% identical to; at least 87% identical to; at least 86% identical to; at least 85% identical to; at least 84% identical to; at least 83% identical to; at least 82% identical to; or at least 80% identical to; a CDRH1 selected from the group consisting of the CDRH1s of Mabs 1 through 21, 23 through 222, 224 through 363, and 371 through 405 as provided in Table 2; with the proviso that the CDRH1 is not 100% identical to the CDRH1 of any of Mabs 223, 364, 365, 366, 367, 368, 369, or 370 as provided in Table 2.

[0170] In certain embodiments, the invention provides an antibody comprising a CDRL3 that is: 100% identical to; at least 99% identical to; at least 98% identical to; at least 97% identical to; at least 96% identical to; at least 95% identical to; at least 94% identical to; at least 93% identical to; at least 92% identical to; at least 91% identical to; at least 90% identical to; at least 89% identical to; at least 88% identical to; at least 87% identical to; at least 86% identical to; at least 85% identical to; at least 84% identical to; at least 83% identical to; at least 82% identical to; or at least 80% identical to; a CDRL3 selected from the group consisting of the CDRL3s of Mabs 1 through 21, 23 through 222, 224 through 363, and 371 through 405 as provided in Table 2; with the proviso that the CDRL3 is not 100% identical to the CDRL3 of any of Mabs 223, 364, 365, 366, 367, 368, 369, or 370 as provided in Table 2.

[0171] In certain embodiments, the invention provides an antibody comprising a CDRL2 that is: 100% identical to; at least 99% identical to; at least 98% identical to; at least 97% identical to; at least 96% identical to; at least 95% identical to; at least 94% identical to; at least 93% identical to; at least 92% identical to; at least 91% identical to; at least 90% identical to; at least 89% identical to; at least 88% identical to; at least 87% identical to; at least 86% identical to; at least 85% identical to; at least 84% identical to; at least 83% identical to; at least 82% identical to; or at least 80% identical to; a CDRL2 selected from the group consisting of the CDRL2s of Mabs 1 through 21, 23 through 222, 224 through 363, and 371 through 405 as provided in Table 2; with the proviso that the CDRL2 is not 100% identical to the CDRL2 of any of Mabs 223, 364, 365, 366, 367, 368, 369, or 370 as provided in Table 2.

[0172] In certain embodiments, the invention provides an antibody comprising a CDRL1 that is: 100% identical to; at least 99% identical to; at least 98% identical to; at least 97% identical to; at least 96% identical to; at least 95% identical to; at least 94% identical to; at least 93% identical to; at least 92% identical to; at least 91% identical to; at least 90% identical to; at least 89% identical to; at least 88% identical to; at least 87% identical to; at least 86% identical to; at least 85% identical to; at least 84% identical to; at least 83% identical to; at least 82% identical to; or at least 80% identical to; a CDRL1 selected from the group consisting of the CDRL1s of Mabs 1 through 21, 23 through 222, 224 through 363, and 371 through 405 as provided in Table 2; with the proviso that the CDRL1 is not 100% identical to the CDRL1 of any of Mabs 223, 364, 365, 366, 367, 368, 369, or 370 as provided in Table 2.

[0173] In certain embodiments, the invention provides an antibody comprising a heavy chain (HC) variable region that is: 100% identical to; at least 99% identical to; at least 98% identical to; at least 97% identical to; at least 96% identical to; at least 95% identical to; at least 94% identical to; at least 93% identical to; at least 92% identical to; at least 91% identical to; at least 90% identical to; at least 89% identical to; at least 88% identical to; at least 87% identical to; at least 86% identical to; at least 85% identical to; at least 84% identical to; at least 83% identical to; at least 82% identical to; or at least 80% identical to; an HC variable region selected from the group consisting of the HC variable regions of Mabs 1 through 21, 23 through 222, 224 through 363, and 371 through 405 as provided in Table 2; with the proviso that the HC variable region is not 100% identical to the HC variable region of any of Mabs 223, 364, 365, 366, 367, 368, 369, or 370 as provided in Table 2.

[0174] In certain embodiments, the invention provides an antibody comprising a light chain (LC) variable region that is: 100% identical to; at least 99% identical to; at least 98% identical to; at least 97% identical to; at least 96% identical to; at least 95% identical to; at least 94% identical to; at least 93% identical to; at least 92% identical to; at least 91% identical to; at least 90% identical to; at least 89% identical to; at least 88% identical to; at least 87% identical to; at least 86% identical to; at least 85% identical to; at least 84% identical to; at least 83% identical to; at least 82% identical to; or at least 80% identical to; a LC variable region selected from the group consisting of the LC variable regions of Mabs 1 through 21, 23 through 222, 224 through 363, and 371 through 405 as provided in Table 2; with the proviso that the LC variable region is not 100% identical to the LC variable region of any of Mabs 223, 364, 365, 366, 367, 368, 369, or 370 as provided in Table 2.

[0175] In certain embodiments, the invention provides an antibody comprising a CDRH3 that is: 100% identical to; at least 99% identical to; at least 98% identical to; at least 97% identical to; at least 96% identical to; at least 95% identical to; at least 94% identical to; at least 93% identical to; at least 92% identical to; at least 91% identical to; at least 90% identical to; at least 89% identical to; at least 88% identical to; at least 87% identical to; at least 86% identical to; at least 85% identical to; at least 84% identical to; at least 83% identical to; at least 82% identical to; or at least 80% identical to; a CDRH3 selected from the group consisting of the CDRH3s of Mabs 1 through 21, 23 through 222, 224 through 363, and 371 through 405 as provided in Table 2; a CDRH2 that is: 100% identical to; at least 99% identical to; at least 98% identical to; at least 97% identical to; at least 96% identical to; at least 95% identical to; at least 94% identical to; at least 93% identical to; at least 92% identical to; at least 91% identical to; at least 90% identical to; at least 89% identical to; at least 88% identical to; at least 87% identical to; at least 86% identical to; at least 85% identical to; at least 84% identical to; at least 83% identical to; at least 82% identical to; or at least 80% identical to; a CDRH2 selected from the group consisting of the CDRH2s of Mabs 1 through 21, 23 through 222, 224 through 363, and 371 through 405 as provided in Table 2; and a CDRH1 that is: 100% identical to; at least 99% identical to; at least 98% identical to; at least 97% identical to; at least 96% identical to; at least 95% identical to; at least 94% identical to; at least 93% identical to; at least 92% identical to; at least 91% identical to; at least 90% identical to; at least 89% identical to; at least 88% identical to; at least 87% identical to; at least 86% identical to; at least 85% identical to; at least 84% identical to; at least 83% identical to; at least 82% identical to; or at least 80% identical to; a CDRH1 selected from the group consisting of the CDRH1s of Mabs 1 through 21, 23 through 222, 224 through 363, and 371 through 405 as provided in Table 2; with the proviso that the neither the CDRH3, CDRH2, nor the CHRH1 is 100% identical to the CHRH3, CDRH2, or CDRH1, respectively, of any of Mabs 223, 364, 365, 366, 367, 368, 369, or 370 as provided in Table 2.

[0176] In certain embodiments, the invention provides an antibody comprising a CDRL3 that is: 100% identical to; at least 99% identical to; at least 98% identical to; at least 97% identical to; at least 96% identical to; at least 95% identical to; at least 94% identical to; at least 93% identical to; at least 92% identical to; at least 91% identical to; at least 90% identical to; at least 89% identical to; at least 88% identical to; at least 87% identical to; at least 86% identical to; at least 85% identical to; at least 84% identical to; at least 83% identical to; at least 82% identical to; or at least 80% identical to; a CDRL3 selected from the group consisting of the CDRL3s of Mabs 1 through 21, 23 through 222, 224 through 363, and 371 through 405 as provided in Table 2; a CDRL2 that is: 100% identical to; at least 99% identical to; at least 98% identical to; at least 97% identical to; at least 96% identical to; at least 95% identical to; at least 94% identical to; at least 93% identical to; at least 92% identical to; at least 91% identical to; at least 90% identical to; at least 89% identical to; at least 88% identical to; at least 87% identical to; at least 86% identical to; at least 85% identical to; at least 84% identical to; at least 83% identical to; at least 82% identical to; or at least 80% identical to; a CDRL2 selected from the group consisting of the CDRL2s of Mabs 1 through 21, 23 through 222, 224 through 363, and 371 through 405 as provided in Table 2; and a CDRL1 that is: 100% identical to; at least 99% identical to; at least 98% identical to; at least 97% identical to; at least 96% identical to; at least 95% identical to; at least 94% identical to; at least 93% identical to; at least 92% identical to; at least 91% identical to; at least 90% identical to; at least 89% identical to; at least 88% identical to; at least 87% identical to; at least 86% identical to; at least 85% identical to; at least 84% identical to; at least 83% identical to; at least 82% identical to; or at least 80% identical; to a CDRL1 selected from the group consisting of the CDRL1s of Mabs 1 through 21, 23 through 222, 224 through 363, and 371 through 405 as provided in Table 2; with the proviso that the neither the CDRL3, CDRL2, nor the CHRL1 is 100% identical to the CHRL3, CDRL2, or CDRL1, respectively, of any of Mabs 223, 364, 365, 366, 367, 368, 369, or 370 as provided in Table 2.

[0177] In certain embodiments, the invention provides an antibody comprising a CDRH3 that is: 100% identical to; at least 99% identical to; at least 98% identical to; at least 97% identical to; at least 96% identical to; at least 95% identical to; at least 94% identical to; at least 93% identical to; at least 92% identical to; at least 91% identical to; at least 90% identical to; at least 89% identical to; at least 88% identical to; at least 87% identical to; at least 86% identical to; at least 85% identical to; at least 84% identical to; at least 83% identical to; at least 82% identical to; or at least 80% identical to; a CDRH3 selected from the group consisting of the CDRH3s of Mabs 1 through 21, 23 through 222, 224 through 363, and 371 through 405 as provided in Table 2; a CDRH2 that is: 100% identical to; at least 99% identical to; at least 98% identical to; at least 97% identical to; at least 96% identical to; at least 95% identical to; at least 94% identical to; at least 93% identical to; at least 92% identical to; at least 91% identical to; at least 90% identical to; at least 89% identical to; at least 88% identical to; at least 87% identical to; at least 86% identical to; at least 85% identical to; at least 84% identical to; at least 83% identical to; at least 82% identical to; or at least 80% identical to; a CDRH2 selected from the group consisting of the CDRH2s of Mabs 1 through 21, 23 through 222, 224 through 363, and 371 through 405 as provided in Table 2; a CDRH1 that is: 100% identical to; at least 99% identical to; at least 98% identical to; at least 97% identical to; at least 96% identical to; at least 95% identical to; at least 94% identical to; at least 93% identical to; at least 92% identical to; at least 91% identical to; at least 90% identical to; at least 89% identical to; at least 88% identical to; at least 87% identical to; at least 86% identical to; at least 85% identical to; at least 84% identical to; at least 83% identical to; at least 82% identical to; or at least 80% identical to; a CDRH1 selected from the group consisting of the CDRH1s of Mabs 1 through 21, 23 through 222, 224 through 363, and 371 through 405 as provided in Table 2; a CDRL3 that is: 100% identical to; at least 99% identical to; at least 98% identical to; at least 97% identical to; at least 96% identical to; at least 95% identical to; at least 94% identical to; at least 93% identical to; at least 92% identical to; at least 91% identical to; at least 90% identical to; at least 89% identical to; at least 88% identical to; at least 87% identical to; at least 86% identical to; at least 85% identical to; at least 84% identical to; at least 83% identical to; at least 82% identical to; or at least 80% identical to; a CDRL3 selected from the group consisting of the CDRL3s of Mabs 1 through 21, 23 through 222, 224 through 363, and 371 through 405 as provided in Table 2; a CDRL2 that is: 100% identical to; at least 99% identical to; at least 98% identical to; at least 97% identical to; at least 96% identical to; at least 95% identical to; at least 94% identical to; at least 93% identical to; at least 92% identical to; at least 91% identical to; at least 90% identical to; at least 89% identical to; at least 88% identical to; at least 87% identical to; at least 86% identical to; at least 85% identical to; at least 84% identical to; at least 83% identical to; at least 82% identical to; or at least 80% identical to; a CDRL2 selected from the group consisting of the CDRL2s of Mabs 1 through 21, 23 through 222, 224 through 363, and 371 through 405 as provided in Table 2; and a CDRL1 that is: 100% identical to; at least 99% identical to; at least 98% identical to; at least 97% identical to; at least 96% identical to; at least 95% identical to; at least 94% identical to; at least 93% identical to; at least 92% identical to; at least 91% identical to; at least 90% identical to; at least 89% identical to; at least 88% identical to; at least 87% identical to; at least 86% identical to; at least 85% identical to; at least 84% identical to; at least 83% identical to; at least 82% identical to; or at least 80% identical to; a CDRL1 selected from the group consisting of the CDRL1s of Mabs 1 through 21, 23 through 222, 224 through 363, and 371 through 405 as provided in Table 2; with the proviso that the neither the CDRH3, CDRH2, CDRH1, CDRL3, CDHL2, nor the CHRL1 is 100% identical to the CHRH3, CDRH2, CDRH1, CDRL3, CDHL2, or the CDRL1, respectively, of any of Mabs 223, 364, 365, 366, 367, 368, 369, or 370 as provided in Table 2.

[0178] In certain embodiments, the invention provides an antibody comprising a CD3 binding domain selected from the group consisting of: the CD3 binding domains of ADI-15512; ADI-15516; and ADI-16513; as provided in Table 2.

[0179] In certain embodiments, the invention provides an antibody comprising a CD3 binding domain selected from the group consisting of: the CD3 binding domains of ADI-18562; ADI-18564; ADI-18565; ADI-18566; ADI-18567; ADI-18568; ADI-18570; ADI-18571; ADI-18572; ADI-18573; ADI-18563; ADI-18569; ADI-18574; ADI-18575; ADI-18576; ADI-18578; ADI-18579; ADI-18580; ADI-18581; ADI-18582; ADI-18584; ADI-18585; ADI-18577; ADI-18583; ADI-18588; ADI-18589; ADI-18590; ADI-18591; ADI-18593; ADI-18594; ADI-18595; ADI-18596; ADI-18597; ADI-18592; ADI-18587; ADI-18586; and; ADI-16606; as provided in Table 2.

[0180] In certain embodiments, the invention provides an antibody comprising a CD3 binding domain selected from the group consisting of: the CD3 binding domains of ADI-18576; ADI-20820; ADI-20578; ADI-20571; ADI-21097; ADI-20577; ADI-20576; ADI-20568; ADI-20582; ADI-20575; ADI-20567; ADI-20574; ADI-20573; ADI-20579; ADI-18565; ADI-20818; ADI-20587; ADI-20588; ADI-20589; ADI-20590; ADI-20594; ADI-20596; ADI-20599; ADI-20605; ADI-20607; ADI-20608; and ADI-20609; as provided in Table 2.

[0181] In certain embodiments, the invention provides an antibody comprising a CD3 binding domain selected from the group consisting of: the CD3 binding domains of ADI-16606; ADI-20587; ADI-20607; ADI-20590; ADI-28708; ADI-28709; ADI-28710; ADI-21943; ADI-28711; ADI-28712; ADI-28713; ADI-28714; ADI-28715; ADI-21944; ADI-28716; ADI-21945; ADI-21946; ADI-28717; ADI-21947; ADI-28718; ADI-28719; ADI-28720; ADI-28721; ADI-28722; ADI-28723; ADI-28724; ADI-28725; ADI-28726; ADI-28727; ADI-28728; ADI-28729; ADI-28730; ADI-28731; ADI-28732; ADI-28733; ADI-28734; ADI-28735; ADI-28736; ADI-28737; ADI-28738; ADI-28739; ADI-28740; ADI-28741; ADI-28742; ADI-28743; ADI-21948; ADI-21949; ADI-28744; ADI-21950; ADI-28745; ADI-28746; ADI-28747; ADI-28748; ADI-21951; ADI-21952; ADI-28749; ADI-28750; ADI-28751; ADI-21953; ADI-28752; ADI-21954; ADI-28753; ADI-28754; ADI-28755; ADI-28756; ADI-28757; ADI-28758; ADI-28759; ADI-28760; ADI-28761; ADI-28762; ADI-28763; ADI-28764; ADI-28765; ADI-28766; ADI-28767; ADI-28768; ADI-21955; ADI-28769; ADI-28770; ADI-21956; ADI-28771; ADI-28772; ADI-28773; ADI-28774; and ADI-28775; as provided in Table 2.

[0182] In certain embodiments, the invention provides an antibody comprising a CD3 binding domain selected from the group consisting of: the CD3 binding domains of ADI-21959; ADI-21963; ADI-21965; ADI-21967; ADI-21970; ADI-21971; ADI-21972; ADI-21973; ADI-21974; ADI-21975; ADI-21976; ADI-21977; ADI-21978; ADI-21979; ADI-21943; ADI-21944; ADI-21945; ADI-21946; ADI-21947; ADI-21948; ADI-21949; ADI-21950; ADI-21951; ADI-21952; ADI-21953; ADI-21954; ADI-21955; and ADI-21956; as provided in Table 2.

[0183] In certain embodiments, the invention provides an antibody comprising a CD3 binding domain selected from the group consisting of: the CD3 binding domains of ADI-21952; ADI-22523; ADI-24403; ADI-24404; ADI-24405; ADI-24407; ADI-24408; ADI-24409; ADI-24410; ADI-24411; ADI-24412; ADI-24413; ADI-24414; ADI-24415; ADI-24416; ADI-24417; ADI-24418; ADI-24434; ADI-24435; ADI-24436; ADI-24437; ADI-24438; ADI-24439; ADI-24440; ADI-24441; ADI-24442; ADI-24443; ADI-24444; ADI-24445; ADI-24446; ADI-24449; ADI-24388; ADI-24389; ADI-24390; ADI-24391; ADI-24392; ADI-24393; ADI-24394; ADI-24395; ADI-24396; ADI-24397; ADI-24398; ADI-24399; ADI-24400; ADI-24401; ADI-24402; ADI-24419; ADI-24420; ADI-24421; ADI-24422; ADI-24423; ADI-24424; ADI-24425; ADI-24426; ADI-24427; ADI-24428; ADI-24429; ADI-24430; ADI-24431; ADI-24432; ADI-24433; ADI-24447; and ADI-24448; as provided in Table 2.

[0184] In certain embodiments, the invention provides an antibody comprising a CD3 binding domain selected from the group consisting of: the CD3 binding domains of ADI-22523; ADI-23652; ADI-23653; ADI-23654; ADI-23655; ADI-23656; ADI-23657; ADI-23658; ADI-23651; ADI-23644; ADI-23645; ADI-23646; ADI-23647; ADI-23648; ADI-23649; ADI-23650; ADI-23667; ADI-23668; ADI-23669; ADI-23670; ADI-23671; ADI-23672; ADI-23673; ADI-23659; ADI-23660; ADI-23661; ADI-23663; ADI-23664; ADI-23639; ADI-23641; ADI-23642; ADI-23640; ADI-23643; ADI-21952; ADI-23633; ADI-23634; ADI-23635; ADI-23636; ADI-23637; ADI-23638; ADI-23632; and ADI-23629; as provided in Table 2.

[0185] In certain embodiments, the invention provides an antibody comprising a CD3 binding domain selected from the group consisting of: the CD3 binding domains of ADI-22523; ADI-26906; ADI-26907; ADI-26908; ADI-26909; ADI-26910; ADI-26912; ADI-26913; ADI-26915; ADI-26916; ADI-26917; ADI-26918; ADI-26919; ADI-26920; ADI-26921; ADI-26924; ADI-26925; ADI-26927; ADI-26928; ADI-26929; ADI-26930; ADI-26932; ADI-26933; ADI-26938; ADI-26939; ADI-26940; ADI-26941; ADI-26942; ADI-26943; ADI-26944; ADI-26945; ADI-26950; ADI-26954; ADI-23672; ADI-23673; ADI-23664; ADI-26955; ADI-26956; ADI-26957; ADI-26958; ADI-26959; ADI-26960; ADI-26962; ADI-26963; ADI-26964; ADI-26965; ADI-26966; ADI-26968; ADI-26969; ADI-26971; ADI-26972; ADI-26973; ADI-26974; ADI-26975; ADI-26976; ADI-26977; ADI-26978; ADI-26979; ADI-26980; ADI-26981; ADI-26982; ADI-26983; ADI-26984; ADI-26985; ADI-26986; ADI-26987; ADI-26988; ADI-26989; ADI-26990; ADI-26991; ADI-26992; ADI-26993; ADI-26994; and ADI-26995; as provided in Table 2.

[0186] In certain embodiments, the invention provides an antibody comprising a CD3 binding domain selected from the group consisting of: the CD3 binding domains of ADI-22523; ADI-26906; ADI-26907; ADI-26908; ADI-26910; ADI-26913; ADI-26915; ADI-26919; ADI-26920; ADI-26921; ADI-26943; ADI-26954; ADI-21952; ADI-26955; ADI-26956; ADI-26962; ADI-26978; ADI-26983; and ADI-26994; as provided in Table 2.

[0187] In certain embodiments, the invention provides an antibody comprising a CD3 binding domain selected from the group consisting of: ADI-15512; ADI-16513; ADI-15516; ADI-18565; ADI-18589; ADI-18585; ADI-18590; ADI-18576; ADI-20568; ADI-20580; ADI-21978; ADI-22523; ADI-25133; and ADI-26906.

[0188] In certain embodiments, the invention provides an antibody comprising a CD3 binding domain selected from the group consisting of: ADI-16606; ADI-29601; ADI-29602; ADI-29603; ADI-20587; ADI-20607; ADI-20590; ADI-21952; ADI-23633; ADI-26955; ADI-26956; ADI-26957; ADI-26958; ADI-26959; ADI-26960; ADI-26961; ADI-26962; ADI-26963; ADI-26964; ADI-26965; ADI-26966; ADI-26967; ADI-26968; ADI-26969; ADI-26970; ADI-26971; ADI-26972; ADI-26973; ADI-26974; ADI-26975; ADI-26976; ADI-26977; ADI-26978; ADI-26979; ADI-26980; ADI-26981; ADI-26982; ADI-26983; ADI-26984; ADI-26985; ADI-26986; ADI-26987; ADI-26988; ADI-26989; ADI-26990; ADI-26991; ADI-26992; ADI-26993; and ADI-26994.

[0189] In certain embodiments, the invention provides an antibody comprising a CD3 binding domain selected from the group consisting of: ADI-32238, ADI-32241, ADI-32244, ADI-32247, ADI-32250, ADI-32253, ADI-32256, ADI-32259, ADI-32239, ADI-32242, ADI-32245, ADI-32248, ADI-32251, ADI-32254, ADI-32257, ADI-32260, ADI-32240, ADI-32243, ADI-32246, ADI-32249, ADI-32252, ADI-32255, ADI-32258, and ADI-32261.

[0190] In certain embodiments, the invention provides an antibody comprising a CD3 binding domain selected from the group consisting of: ADI-29295, ADI-32249, ADI-29298, ADI-29300, and ADI-26915.

[0191] In certain embodiments either alone or in combination with other embodiments of the invention, the inventive CD3 binding domains and antibodies comprising them display a decreased propensity for degradation relative to one or more of: trastuzumab; (Herceptin®); lintuzumab; blinatumomab (Blincyto®); and Mab 364, Mab366, Mab 367, Mab 368, Mab 369, Mab 370, or Mab 22, as provided in Table 2.

[0192] In certain embodiments either alone or in combination with other embodiments of the invention, the inventive CD3 binding domains and antibodies comprising them display a decreased CRS risk profile relative to one or more of: trastuzumab; (Herceptin®); lintuzumab; blinatumomab (Blincyto®); and Mab 364, Mab366, Mab 367, Mab 368, Mab 369, Mab 370, or Mab 22, as provided in Table 2.

[0193] In certain embodiments and/or in combination with any of the embodiments disclosed herein and throughout, provided are CD3 binding domains and antibodies comprising them that are humanized. In certain embodiments, such CD3 binding domains comprise CDRs of such other embodiments, and further comprise an acceptor human framework, e.g., a human immunoglobulin framework or a human consensus framework.

[0194] In certain embodiments and/or in combination with any of the embodiments disclosed herein and throughout provided are CD3 binding domains and antibodies comprising them comprising a VH as in any of the embodiments provided herein and throughout, and a VL as in any of the embodiments provided herein and throughout, wherein one or both of the variable domain sequences include post-translational modifications.

[0195] In a further aspect of the invention, provided are CD3 binding domains and antibodies comprising them that bind to the same epitope as a CD3 binding domain provided in the other embodiments disclosed therein and throughout.

[0196] In certain embodiments, CD3 binding domains and/or antibodies comprising them have a CD3 dissociation constant (Kd) of ≤1 μM, ≤100 nM, ≤10 nM, ≤1 nM, ≤0.1 nM, ≤0.01 nM, or ≤0.001 nM (e.g., 10⁻⁸ M or less, e.g., from 10⁻⁸ M to 10⁻¹³ M, e.g., from 10⁻⁹ M to 10⁻¹³M).

[0197] In certain embodiments, Kd is measured by: biolayer interferometry (BLI), surface plasmon resonance (SPR), solution equilibrium based kinetic exclusion assays, KinExA direct association, assays using FORTEBIO instruments and reagents, such as Octet RED 384 and HTX BLI-based instruments, enzyme-linked immunosorbent assays (ELISA), or radioimmunoassay (RIA). In certain embodiments, the Kd measurement is performed with the Fab version of an inventive CD3 binding domain or antibody comprising it. For example, solution binding affinity of Fabs for antigen is measured by equilibrating Fab with a minimal concentration of (1251)-labeled antigen in the presence of a titration series of unlabeled antigen, then capturing bound antigen with an anti-Fab antibody-coated plate (see, e.g., Chen et al., J. Mol. Biol. 293:865-881 (1999)). To establish conditions for the assay, MICROTITER® multi-well plates (Thermo Scientific) are coated overnight with 5 μg/ml of a capturing anti-Fab antibody (Cappel Labs) in 50 mM sodium carbonate (pH 9.6), and subsequently blocked with 2% (w/v) bovine serum albumin in PBS for two to five hours at room temperature (approximately 23° C.). In a non-adsorbent plate (Nunc #269620), 100 pM or 26 pM [1251]-antigen are mixed with serial dilutions of a Fab of interest (e.g., consistent with assessment of the anti-VEGF antibody, Fab-12, in Presta et al., Cancer Res. 57:4593-4599 (1997)). The Fab of interest is then incubated overnight; however, the incubation may continue for a longer period (e.g., about 65 hours) to ensure that equilibrium is reached. Thereafter, the mixtures are transferred to the capture plate for incubation at room temperature (e.g., for one hour). The solution is then removed and the plate washed eight times with 0.1% polysorbate 20 (TWEEN-20®) in PBS. When the plates have dried, 150 dl/well of scintillant (MICROSCINT-20™; Packard) is added, and the plates are counted on a TOPCOUNT™ gamma counter (Packard) for ten minutes. Concentrations of each Fab that give less than or equal to 20% of maximal binding are chosen for use in competitive binding assays.

[0198] In other embodiments, Kd is measured using a BIACORE® surface plasmon resonance assay. For example, an assay using a BIACORE®-2000 or a BIACORE®-3000 (BIACORE, Inc., Piscataway, N.J.) is performed at 25° C. with immobilized antigen CM5 chips at 10 response units (RU). In one embodiment, carboxymethylated dextran biosensor chips (CM5, BIACORE, Inc.) are activated with N-ethyl-N′-(3-dimethylaminopropyl)-carbodiimide hydrochloride (EDC) and N-hydroxysuccinimide (NHS) according to the supplier's instructions. Antigen is diluted with 10 mM sodium acetate, pH 4.8, to 5 μg/ml (0.2 μM) before injection at a flow rate of 5 l/minute to achieve approximately 10 response units (RU) of coupled protein. Following the injection of antigen, 1 M ethanolamine is injected to block unreacted groups. For kinetics measurements, two-fold serial dilutions of Fab (0.78 nM to 500 nM) are injected in PBS with 0.05% polysorbate 20 (TWEEN-20™) surfactant (PBST) at 25° C. at a flow rate of approximately 25 μl/min. Association rates (kₒₙ) and dissociation rates (KO are calculated using a simple one-to-one Langmuir binding model (BIACORE® Evaluation Software version 3.2) by simultaneously fitting the association and dissociation sensorgrams. The equilibrium dissociation constant (Kd) is calculated as the ratio kon/koff. See, for example, Chen et al., J. Mol. Biol. 293:865-881 (1999). If the on-rate exceeds 106 M-1s-1 by the surface plasmon resonance assay above, then the on-rate can be determined by using a fluorescent quenching technique that measures the increase or decrease in fluorescence emission intensity (excitation=295 nm; emission=340 nm, 16 nm band-pass) at 25° C. of a 20 nM anti-antigen antibody (Fab form) in PBS, pH 7.2, in the presence of increasing concentrations of antigen as measured in a spectrometer, such as a stop-flow equipped spectrophotometer (Aviv Instruments) or a 8000-series SLM-AMINC spectrophotometer (THERMOSPECTRONIC) with a stirred cuvette.

[0199] In certain embodiments, the inventive CD3 binding domains and antibodies comprising them comprise an antibody fragment. Antibody fragments include, but are not limited to, Fab, Fab′, Fab′-SH, F(ab′)₂, Fv, and scFv fragments, and other fragments described herein and throughout. For a review of certain antibody fragments, see, e.g., Hudson et al. Nat. Med. 9:129-134 (2003). For a review of scFv fragments, see, e.g., Pluckthtin, in The Pharmacology of Monoclonal Antibodies, vol. 113, Rosenburg and Moore eds., (Springer-Verlag, New York), pp. 269-315 (1994); see also WO 93/16185; and U.S. Pat. Nos. 5,571,894 and 5,587,458. For discussion of Fab and F(ab′)2 fragments comprising salvage receptor binding epitope residues and having increased in vivo half-life, see U.S. Pat. No. 5,869,046.

[0200] Diabodies are antibody fragments with two antigen-binding sites that may be bivalent or bispecific. See, for example, EP 404,097; WO 1993/01161; Hudson et al. Nat. Med. 9:129-134 (2003); and Hollinger et al. Proc. Natl. Acad. Sci. USA 90: 6444-6448 (1993). Triabodies and tetrabodies are also described in Hudson et al. Nat. Med. 9:129-134 (2003).

[0201] Single-domain antibodies are antibody fragments comprising all or a portion of the heavy chain variable domain or all or a portion of the light chain variable domain of an antibody. In certain embodiments, a single-domain antibody is a human single-domain antibody (Domantis, Inc., Waltham, Mass.; see, e.g., U.S. Pat. No. 6,248,516 B1).

[0202] Antibody fragments can be made by various techniques, including but not limited to proteolytic digestion of an intact antibody as well as production by recombinant host cells (e.g. E. coli or phage), as described herein.

[0203] In certain embodiments, the inventive CD3 binding domains and antibodies comprising them comprise a chimeric antibody. Certain chimeric antibodies are described, e.g., in U.S. Pat. No. 4,816,567; and Morrison et al. Proc. Natl. Acad. Sci. USA, 81:6851-6855 (1984)). In one example, a chimeric antibody comprises a non-human variable region (e.g., a variable region derived from a mouse, rat, hamster, rabbit, or non-human primate, such as a monkey) and a human constant region. In a further example, a chimeric antibody is a “class switched” antibody in which the class or subclass has been changed from that of the parent antibody. Chimeric antibodies include antigen-binding fragments thereof.

[0204] In certain embodiments, the inventive CD3 binding domains and antibodies comprising them comprise a chimeric antibody that is a humanized antibody. Typically, a non-human antibody is humanized to reduce immunogenicity to humans, while retaining the specificity and affinity of the parental non-human antibody. Generally, a humanized antibody comprises one or more variable domains in which CDRs (or portions thereof) are derived from a non-human antibody, and FRs (or portions thereof) are derived from human antibody sequences. A humanized antibody optionally will also comprise at least a portion of a human constant region. In some embodiments, some FR residues in a humanized antibody are substituted with corresponding residues from a non-human antibody (e.g., the antibody from which the CDR residues are derived), e.g., to restore or improve antibody specificity, affinity, lack or immunogenicity, stability, developability profile, CRS risk, and the like.

[0205] Humanized antibodies and methods of making them are reviewed, e.g., in Almagro and Fransson, Front. Biosci. 13:1619-1633 (2008), and are further described, e.g., in Riechmann et al., Nature 332:323-329 (1988); Queen et al., Proc. Nat'l Acad. Sci. USA 86:10029-10033 (1989); U.S. Pat. Nos. 5,821,337, 7,527,791, 6,982,321, and 7,087,409; Kashmiri et al., Methods 36:25-34 (2005) (describing specificity determining region (SDR) grafting); Padlan, Mol. Immunol. 28:489-498 (1991) (describing “resurfacing”); Dall'Acqua et al., Methods 36:43-60 (2005) (describing “FR shuffling”); and Osbourn et al., Methods 36:61-68 (2005) and Klimka et al., Br. J. Cancer, 83:252-260 (2000) (describing the “guided selection” approach to FR shuffling).

[0206] Human framework regions that may be used for humanization include but are not limited to: framework regions selected using the “best-fit” method (see, e.g., Sims et al. J. Immunol. 151:2296 (1993)); framework regions derived from the consensus sequence of human antibodies of a particular subgroup of light or heavy chain variable regions (see, e.g., Carter et al. Proc. Natl. Acad. Sci. USA, 89:4285 (1992); and Presta et al. J. Immunol., 151:2623 (1993)); human mature (somatically mutated) framework regions or human germline framework regions (see, e.g., Almagro and Fransson, Front. Biosci. 13:1619-1633 (2008)); and framework regions derived from screening FR libraries (see, e.g., Baca et al., J. Biol. Chem. 272:10678-10684 (1997) and Rosok et al., J. Biol. Chem. 271:22611-22618 (1996)).

[0207] In certain embodiments, the inventive CD3 binding domains and antibodies comprising them comprise a human antibody. Human antibodies can be produced using various techniques known in the art. Human antibodies are described generally in van Dijk and van de Winkel, Curr. Opin. Pharmacol. 5: 368-74 (2001) and Lonberg, Curr. Opin. Immunol. 20:450-459 (2008).

[0208] Human antibodies may be prepared by administering an immunogen to a transgenic animal that has been modified to produce intact human antibodies or intact antibodies with human variable regions in response to antigenic challenge. Such animals typically contain all or a portion of the human immunoglobulin loci, which replace the endogenous immunoglobulin loci, or which are present extrachromosomally or integrated randomly into the animal's chromosomes. In such transgenic mice, the endogenous immunoglobulin loci have generally been inactivated. For review of methods for obtaining human antibodies from transgenic animals, see Lonberg, Nat. Biotech. 23:1117-1125 (2005). See also, e.g., U.S. Pat. Nos. 6,075,181 and 6,150,584 describing XENOMOUSE technology; U.S. Pat. No. 5,770,429 describing HUMAB® technology; U.S. Pat. No. 7,041,870 describing K-M MOUSE® technology, and U.S. Patent Application Publication No. US 2007/0061900, describing VELOCIMOUSE® technology). Human variable regions from intact antibodies generated by such animals may be further modified, e.g., by combining with a different human constant region.

[0209] Human antibodies can also be made by hybridoma-based methods. Human myeloma and mouse-human heteromyeloma cell lines for the production of human monoclonal antibodies have been described. (See, e.g., Kozbor J. Immunol., 133: 3001 (1984); Brodeur et al., Monoclonal Antibody Production Techniques and Applications, pp. 51-63 (Marcel Dekker, Inc., New York, 1987); and Boerner et al., J. Immunol., 147: 86 (1991).) Human antibodies generated via human B-cell hybridoma technology are also described in Li et al., Proc. Natl. Acad. Sci. LISA. 103; 3557-3562 (2006). Additional methods include those described, for example, in U.S. Pat. No. 7,189,826 (describing production of monoclonal human IgM antibodies from hybridoma cell lines) and Ni, Xiandai Mianyixue, 26(4):265-268 (2006) (describing human-human hybridomas). Human hybridoma technology (Trioma technology) is also described in Vollmers and Brandlein, Histology and Histopathology, 20(3):927-937 (2005) and Vollmers and Brandlein, Methods and Findings in Experimental and Clinical Pharmacology, 27(3):185-91 (2005).

[0210] Human antibodies may also be generated by isolating Fv clone variable domain sequences selected from human-derived phage display libraries. Such variable domain sequences may then be combined with a desired human constant domain. Techniques for selecting human antibodies from antibody libraries are described herein and throughout.

[0211] Antibodies of the invention may be isolated by screening combinatorial libraries for antibodies with the desired activity or activities. For example, a variety of methods are known in the art for generating phage display libraries and screening such libraries for antibodies possessing the desired binding characteristics. Such methods are reviewed, e.g., in Hoogenboom et al. in Methods in Molecular Biology 178:1-37 (O'Brien et al., ed., Human Press, Totowa, N.J., 2001) and further described, e.g., in the McCafferty et al., Nature 348:552-554; Clackson et al., Nature 352: 624-628 (1991); Marks et al., J. Mol. Biol. 222: 581-597 (1992); Marks and Bradbury, in Methods in Molecular Biology 248:161-175 (Lo, ed., Human Press, Totowa, N.J., 2003); Sidhu et al., J. Mol. Biol. 338(2): 299-310 (2004); Lee et al., J. Mol. Biol. 340(5): 1073-1093 (2004); Fellouse, Proc. Natl. Acad. Sci. USA 101(34): 12467-12472 (2004); and Lee et al., J. Immunol. Methods 284(1-2): 119-132(2004).

[0212] In certain embodiments, the inventive CD3 binding domains and antibodies comprising them may be selected from yeast-based antibody libraries, such as those disclosed in, e.g., WO 2009/0363379; WO 2010/105256; and WO 2012/009568. In certain embodiments, the inventive CD3 binding domains and antibodies comprising them may be optimized (also known as “affinity matured) as disclosed herein and throughout as well as in WO 2009/0363379; WO 2010/105256; and WO 2012/009568 and via other techniques available in the art.

[0213] In certain phage display methods, repertoires of VH and VL genes are separately cloned by polymerase chain reaction (PCR) and recombined randomly in phage libraries, which can then be screened for antigen-binding phage as described in Winter et al., Ann. Rev. Immunol., 12: 433-455 (1994). Phage typically display antibody fragments, either as single-chain Fv (scFv) fragments or as Fab fragments. Libraries from immunized sources provide high-affinity antibodies to the immunogen without the requirement of constructing hybridomas. Alternatively, the naive repertoire can be cloned (e.g., from human) to provide a single source of antibodies to a wide range of non-self and also self antigens without any immunization as described by Griffiths et al., EMBO J, 12: 725-734 (1993). Finally, naive libraries can also be made synthetically by cloning unrearranged V-gene segments from stem cells and using PCR primers containing random sequence to encode the highly variable CDR3 regions and to accomplish rearrangement in vitro, as described by Hoogenboom and Winter, J. Mol. Biol., 227: 381-388 (1992). Patent publications describing human antibody phage libraries include, for example: U.S. Pat. No. 5,750,373, and US Patent Publication Nos. 2005/0079574, 2005/0119455, 2005/0266000, 2007/0117126, 2007/0160598, 2007/0237764, 2007/0292936, and 2009/0002360.

[0214] Antibodies or antibody fragments isolated from human antibody libraries are considered human antibodies or human antibody fragments herein.

[0215] In certain embodiments, the inventive CD3 binding domains and antibodies comprising them comprise a multispecific antibody, for example, a bispecific antibody. Multispecific antibodies are monoclonal antibodies that have binding specificities for at least two different antigens, or at least two different epitopes present on the same antigen. In certain embodiments, bispecific antibodies may bind to two different epitopes of CD3 (e.g., CD3ε or CD3γ). In certain embodiments, one of the binding specificities is for CD3 (e.g., CD3ε or CD3γ) and the other is for any other antigen (e.g., a second biological molecule, e.g., a cell surface antigen, e.g., a tumor antigen). Accordingly, a bispecific anti-CD3 antibody may have binding specificities for CD3 and a second biological molecule, such as a second biological molecule (e.g., a tumor antigen) listed in Table 1 and described in U.S. Pub. No. 2010/0111856.In certain embodiments, the inventive CD3 binding domains and antibodies comprising them comprise a multispecific antibody, for example, a bispecific antibody wherein the multispecific antibody comprises a second binding domain having specificity for a second antigen, such as: a human leukocyte antigen (HLA)-peptide complex presented on the cell surface by MHC.

[0216] In certain embodiments, the inventive CD3 binding domains and antibodies comprising them comprise a multispecific antibody, for example, a bispecific antibody wherein the multispecific antibody comprises a second binding domain having specificity for a second antigen selected from the group consisting of: 0772P (CA125, MUC16; Genbank accession no. AF36148); adipophilin (perilipin-2, Adipose differentiation-related protein, ADRP, ADFP, MGC10598; NCBI Reference Sequence: NP-001113.2); AIM-2 (Absent In Melanoma 2, PYHIN4, Interferon-Inducible Protein AIM2; NCBI Reference Sequence: NP-004824.1); ALDH1 A1 (Aldehyde Dehydrogenase 1 Family, Member A1, ALDH1, PUMB 1, Retinaldehyde Dehydrogenase 1, ALDC, ALDH-E1, ALHDII, RALDH 1, EC 1.2.1.36, ALDH11, HEL-9, HEL-S-53e, HEL12, RALDH1, Acetaldehyde Dehydrogenase 1, Aldehyde Dehydrogenase 1, Soluble, Aldehyde Dehydrogenase, Liver Cytosolic, ALDH Class 1, Epididymis Luminal Protein 12, Epididymis Luminal Protein 9, Epididymis Secretory Sperm Binding Protein Li 53e, Retinal Dehydrogenase 1, RaIDH1, Aldehyde Dehydrogenase Family 1 Member A1, Aldehyde Dehydrogenase, Cytosolic, EC 1.2.1; NCBI Reference Sequence: NP-000680.2); alpha-actinin-4 (ACTN4, Actinin, Alpha 4, FSGS1, Focal Segmental Glomerulosclerosis 1, Non-Muscle Alpha-Actinin 4, F-Actin Cross-Linking Protein, FSGS, ACTININ-4, Actinin Alpha4 Isoform, alpha-actinin-4; NCBI Reference Sequence: NP-004915.2); alpha-fetoprotein (AFP, HPAFP, FETA, alpha-1-fetoprotein, alpha-fetoglobulin, Alpha-1-fetoprotein, Alpha-fetoglobulin, HP; GenBank: AAB58754.1); Amphiregulin (AREG, SDGF, Schwannoma-Derived Growth Factor, Colorectum Cell-Derived Growth Factor, AR, CRDGF; GenBank: AAA51781.1); ARTC1 (ART1, ADP-Ribosyltransferase 1, Mono(ADP-Ribosyl)Transferase 1, ADP-Ribosyltransferase C2 And C3 Toxin-Like 1, ART2, CD296, RT6, ADP-Ribosyltransferase 2, GPI-Linked NAD(P)(+)-Arginine ADP-Ribosyltransferase 1, EC 2.4.2.31, CD296 Antigen; NP); ASLG659; ASPHDI (Aspartate Beta-Hydroxylase Domain Containing 1, Aspartate Beta-Hydroxylase Domain-Containing Protein 1, EC 1.14.11.-, EC 1.14.11; GenBank: AAI44153.1); B7-H4 (VTCN1, V-Set Domain Containing T Cell Activation Inhibitor 1, B7H4, B7 Superfamily Member 1, Immune Costimulatory Protein B7-H4, B7h.5, T-Cell Costimulatory Molecule B7x, B7S1, B7X, VCTN1, H4, B7 Family Member, PRO1291, B7 Family Member, H4, T Cell Costimulatory Molecule B7x, V-Set Domain-Containing T-Cell Activation Inhibitor 1, Protein B7S1; GenBank: AAZ17406.1); BAFF-R (TNFRSF13C, Tumor Necrosis Factor Receptor Superfamily, Member 13C, BAFFR, B-Cell-Activating Factor Receptor, BAFF Receptor, BLyS Receptor 3, CVID4, BROMIX, CD268, B Cell-Activating Factor Receptor, prolixin, Tumor Necrosis Factor Receptor Superfamily Member 13C, BR3, CD268 Antigen; NCBI Reference Sequence: NP-443177.1); BAGE-1; BCLX (L); BCR-ABL fusion protein (b3a2); beta-catenin (CTNNB1, Catenin (Cadherin-Associated Protein), Beta 1, 88 kDa, CTNNB, MRD19, Catenin (Cadherin-Associated Protein), Beta 1 (88 kD), armadillo, Catenin Beta-1; GenBank: CAA61107.1); BING-4 (WDR46, WD Repeat Domain 46, C6orf11, BING4, WD Repeat-Containing Protein BING4, Chromosome 6 Open Reading Frame 11, FP221, UTP7, WD Repeat-Containing Protein 46; NP); BMPR1 B (bone morphogenetic protein receptor-type IB, Genbank accession no. NM-00120; NP); B-RAF (Brevican (BCAN, BEHAB, Genbank accession no. AF22905); Brevican (BCAN, Chondroitin Sulfate Proteoglycan 7, Brain-Enriched Hyaluronan-Binding Protein, BEHAB, CSPG7, Brevican Proteoglycan, Brevican Core Protein, Chondroitin Sulfate Proteoglycan BEHAB; GenBank: AAH27971.1); CALCA (Calcitonin-Related Polypeptide Alpha, CALC1, Calcitonin 1, calcitonin, Alpha-Type CGRP, Calcitonin Gene-Related Peptide I, CGRP-I, CGRP, CGRP1, CT, KC, Calcitonin/Calcitonin-Related Polypeptide, Alpha, katacalcin; NP); CASP-5 (CASP5, Caspase 5, Apoptosis-Related Cysteine Peptidase, Caspase 5, Apoptosis-Related Cysteine Protease, Protease ICH-3, Protease TY, ICE(rel)-111, ICE(rel)III, ICEREL-III, ICH-3, caspase-5, TY Protease, EC 3.4.22.58, ICH3, EC 3.4.22; NP); CASP-8; CD19 (CD19-B-lymphocyte antigen CD19 isoform 2 precursor, B4, CVID3 [Homo sapiens], NCBI Reference Sequence: NP-001761.3); CD20 (CD20-B-lymphocyte antigen CD20, membrane-spanning 4-domains, subfamily A, member 1, B1,Bp35,CD20,CVID5,LEU-16,MS4A2,S7; NCBI Reference Sequence: NP-690605.1); CD21 (CD21 (CR2 (Complement receptor or C3DR (C3d/Epstein Barr virus receptor) or Hs.73792 Genbank accession no. M2600); (CD22 (B-cell receptor CD22-B isoform, BL-CAM, Lyb-8, LybB, SIGLEC-2, FLJ22814, Genbank accession No. AK02646); CD22; CD33 (CD33 Molecule, CD33 Antigen (Gp67), Sialic Acid Binding Ig-Like Lectin 3, Sialic Acid-Binding Ig-Like Lectin 3, SIGLEC3, gp67, SIGLEC-3, Myeloid Cell Surface Antigen CD33, p67, Siglec-3, CD33 Antigen; GenBank: AAH28152.1); CD45; CD70 (CD70-tumor necrosis factor (ligand) superfamily, member 7; surface antigen CD70; Ki-24 antigen; CD27 ligand; CD27-L; tumor necrosis factor ligand superfamily member 7; NCBI Reference Sequence for species Homo sapiens: NP-001243.1); CD72 (CD72 (B-cell differentiation antigen CD72, Lyb-; 359 aa, al: 8.66, MW: 40225, TM: 1 [P] Gene Chromosome: 9p13.3, Genbank accession No. NP-001773.); CD79a (CD79a (CD79A, CD79a, immunoglobulin-associated alpha, a B cell-specific protein that covalently interacts with Ig beta (CD79B) and forms a complex on the surface with Ig M molecules, transduces a signal involved in B-cell differentiation), al: 4.84, MW: 25028 TM: 2 [P] Gene Chromosome: 19q13.2, Genbank accession No. NP-001774.1); CD79b (CD79b (CD79B, CD79b, IGb (immunoglobulin-associated beta), B29, Genbank accession no. NM-000626 or 1103867); Cdc27 (Cell Division Cycle 27, D0S1430E, D17S978E, Anaphase Promoting Complex Subunit 3, Anaphase-Promoting Complex Subunit 3, ANAPC3, APC3, CDC27Hs, H-NUC, CDC27 Homolog, Cell Division Cycle 27 Homolog (S. Cerevisiae), HNUC, NUC2, Anaphase-Promoting Complex, Protein 3, Cell Division Cycle 27 Homolog, Cell Division Cycle Protein 27 Homolog, Nuc2 Homolog; GenBank: AAH11656.1); CDK4 (Cyclin-Dependent Kinase 4, Cell Division Protein Kinase 4, PSK-J3, EC 2.7.11.22, CMM3, EC 2.7.11; NCBI Reference Sequence: NP-000066.1); CDKN2A (Cyclin-Dependent Kinase Inhibitor 2A, MLM, CDKN2, MTS1, Cyclin-Dependent Kinase Inhibitor 2A (Melanoma, P16, Inhibits CDK4), Cyclin-Dependent Kinase 4 Inhibitor A, Multiple Tumor Suppressor 1, CDK4I, MTS-1, CMM2, P16, ARF, INK4, INK4A, P14, P14ARF, P16-INK4A, P16INK4, P16INK4A, P19, P19ARF, TP16, CDK4 Inhibitor P16-INK4, Cell Cycle Negative Regulator Beta, p14ARF, p16-INK4, p16-INK4a, p16INK4A, p19ARF; NP); CEA; CLL1 (CLL-1 (CLEC12A, MICL, and DCAL, encodes a member of the C-type lectin/C-type lectin-like domain (CTL/CTLD) superfamily. Members of this family share a common protein fold and have diverse functions, such as cell adhesion, cell-cell signaling, glycoprotein turnover, and roles in inflammation and immune response. The protein encoded by this gene is a negative regulator of granulocyte and monocyte function. Several alternatively spliced transcript variants of this gene have been described, but the full-length nature of some of these variants has not been determined. This gene is closely linked to other CTL/CTLD superfamily members in the natural killer gene complex region on chromosome 12p13 (Drickamer K Curr. Opin. Struct. Biol. 9):585-90; van Rhenen A, et al., Blood 110):2659-66; Chen C H, et al. Blood 107):1459-67; Marshall A S, et al. Eur. J. Immunol. 36):2159-69; Bakker A B, et al Cancer Res. 64:8443-50; Marshall A S, et al J. Biol. Chem. 279:14792-80. CLL-1 has been shown to be a type II transmembrane receptor comprising a single C-type lectin-like domain (which is not predicted to bind either calcium or sugar), a stalk region, a transmembrane domain and a short cytoplasmic tail containing an ITIM motif.); CLPP (Caseinolytic Mitochondrial Matrix Peptidase Proteolytic Subunit, Endopeptidase Clp, EC 3.4.21.92, PRLTS3, ATP-Dependent Protease ClpAP (E. Coli), ClpP (Caseinolytic Protease, ATP-Dependent, Proteolytic Subunit, E. Coli) Homolog, ClpP Caseinolytic Peptidase, ATP-Dependent, Proteolytic Subunit Homolog (E. Coli), ClpP Caseinolytic Protease, ATP-Dependent, Proteolytic Subunit Homolog (E. Coli), human, Proteolytic Subunit, ATP-Dependent Protease ClpAP, Proteolytic Subunit, Human, ClpP Caseinolytic Peptidase ATP-Dependent, Proteolytic Subunit, ClpP Caseinolytic Peptidase, ATP-Dependent, Proteolytic Subunit Homolog, ClpP Caseinolytic Protease, ATP-Dependent, Proteolytic Subunit Homolog, Putative ATP-Dependent Clp Protease Proteolytic Subunit, Mitochondrial; NP); COA-1; CPSF; CRIPTO (CRIPTO (CR, CR1, CRGF, CRIPTO, TDGF 1, teratocarcinoma-derived growth factor, Genbank accession no. NP-003203 or NM-00321); Cw6; CXCR5 CXCR5 (Burkitt's lymphoma receptor 1, a G protein-coupled receptor that is activated by the CXCL13 chemokine, functions in lymphocyte migration and humoral defense, plays a role in HIV-2 infection and perhaps development of AIDS, lymphoma, myeloma, and leukemia); 372 aa, al: 8.54 MW: 41959 TM: 7 [P] Gene Chromosome: 11q23.3, Genbank accession No. NP-001707.); CXORF61 CXORF61-chromosome X open reading frame 61[Homo sapiens], NCBI Reference Sequence: NP-001017978.1); cyclin Di (CCND1, BCL1, PRAD1, D11S287E, B-Cell CLL/Lymphoma 1, B-Cell Lymphoma 1 Protein, BCL-1 Oncogene, PRAD1 Oncogene, Cyclin Dl (PRAD1: Parathyroid Adenomatosis 1), G1/S-Specific Cyclin Dl, Parathyroid Adenomatosis 1, U21B31, G1/S-Specific Cyclin-D1, BCL-1; NCBI Reference Sequence: NP-444284.1); Cyclin-A1 (CCNA1, CT146, Cyclin A1; GenBank: AAH36346.1); dek-can fusion protein; DKK1 (Dickkopf WNT Signaling Pathway Inhibitor 1, SK, hDkk-1, Dickkopf (Xenopus Laevis) Homolog 1, Dickkopf 1 Homolog (Xenopus Laevis), DKK-1, Dickkopf 1 Homolog, Dickkopf Related Protein-1, Dickkopf-1 Like, Dickkopf-Like Protein 1, Dickkopf-Related Protein 1, Dickkopf-1, Dkk-1; GenBank: AAQ89364.1); DR1 (Down-Regulator Of Transcription 1, TBP-Binding (Negative Cofactor 2), Negative Cofactor 2-Beta, TATA-Binding Protein-Associated Phosphoprotein, NC2, NC2-BETA, Protein Drl, NC2-beta, Down-Regulator Of Transcription 1; NCBI Reference Sequence: NP-001929.1); DR13 (Major Histocompatibility Complex, Class II, DR Beta 1, HLA-DR1B, DRw10, DW2.2/DR2.2, SS1, DRB1, HLA-DRB, HLA Class II Histocompatibility Antigen, DR-1 Beta Chain, Human Leucocyte Antigen DRB1, Lymphocyte Antigen DRB1, MHC Class II Antigen, MHC Class II HLA-DR Beta 1 Chain, MHC Class II HLA-DR-Beta Cell Surface Glycoprotein, MHC Class II HLA-DRw10-Beta, DR-1, DR-12, DR-13, DR-14, DR-16, DR-4, DR-5, DR-7, DR-8, DR-9, DR1, DR12, DR13, DR14, DR16, DR4, DR5, DR7, DRB, DR9, DRw 1, DRw8, HLA-DRB2, Clone P2-Beta-3, MHC Class II Antigen DRB1*1, MHC Class II Antigen DRB1*10, MHC Class II Antigen DRB1*11, MHC Class II Antigen DRB1*12, MHC Class II Antigen DRB1*13, MHC Class II Antigen DRB1*14, MHC Class II Antigen DRB1*15, MHC Class II Antigen DRB1*16, MHC Class II Antigen DRB1*3, MHC Class II Antigen DRB1*4, MHC Class II Antigen DRB1*7, MHC Class II Antigen DRB1*8, MHC Class II Antigen DRB1*9; NP); E16 (E16 (LAT1, SLC7A5, Genbank accession no. NM-00348); EDAR (EDAR—tumor necrosis factor receptor superfamily member EDAR precursor, EDA-A1 receptor; downless homolog; ectodysplasin-A receptor; ectodermal dysplasia receptor; anhidrotic ectodysplasin receptor 1, DL; ECTD10A; ECTD10B; ED1R; ED3; ED5; EDA-A1R; EDA1R; EDA3; HRM1 [Homo sapiens]; NCBI Reference Sequence: NP-071731.1); EFTUD2 (Elongation Factor Tu GTP Binding Domain Containing 2, Elongation Factor Tu GTP-Binding Domain-Containing Protein 2, hSNU114, SNU114 Homolog, U5 SnRNP-Specific Protein, 116 KDa, MFDGA, KIAA0031, 116 KD, U5 SnRNP Specific Protein, 116 KDa U5 Small Nuclear Ribonucleoprotein Component, MFDM, SNRNP116, Snrpll116, Snull 14, U5-116KD, SNRP116, U5-116 KDa; GenBank: AAH02360.1); EGFR (Epidermal Growth Factor Receptor, ERBB, Proto-Oncogene C-ErbB-1, Receptor Tyrosine-Protein Kinase ErbB-1, ERBB 1, HER1, EC 2.7.10.1, Epidermal Growth Factor Receptor (Avian Erythroblastic Leukemia Viral (V-Erb-B) Oncogene Homolog), Erythroblastic Leukemia Viral (V-Erb-B) Oncogene Homolog (Avian), P1G61, Avian Erythroblastic Leukemia Viral (V-Erb-B) Oncogene Homolog, Cell Growth Inhibiting Protein 40, Cell Proliferation-Inducing Protein 61, mENA, EC 2.7.10; GenBank: AAH94761.1); EGFR-G719A; EGFR-G719C; EGFR-G719S; EGFR-L858R; EGFR-L861 Q; EGFR-57681; EGFR-T790M; Elongation factor 2 (EEF2, Eukaryotic Translation Elongation Factor 2, EF2, Polypeptidyl-TRNA Translocase, EF-2, SCA26, EEF-2; NCBI Reference Sequence: NP-001952.1); ENAH (hMena) (Enabled Homolog (Drosophila), MENA, Mammalian Enabled, ENA, NDPP1, Protein Enabled Homolog; GenBank: AAH95481.1)-results for just “ENAH” not “ENAH (hMena)”; EpCAM (Epithelial Cell Adhesion Molecule, M4S1, MIC 18, Tumor-Associated Calcium Signal Transducer 1, TACSTD1, TROP1, Adenocarcinoma-Associated Antigen, Cell Surface Glycoprotein Trop-1, Epithelial Glycoprotein 314, Major Gastrointestinal Tumor-Associated Protein GA733-2, EGP314, KSA, DIAR5, HNPCC8, Antigen Identified By Monoclonal Antibody AUA1, EGP-2, EGP40, ESA, KS 1/4, MK-1, Human Epithelial Glycoprotein-2, Membrane Component, Chromosome 4, Surface Marker (35 kD Glycoprotein), EGP, Ep-CAM, GA733-2, M1S2, CD326 Antigen, Epithelial Cell Surface Antigen, hEGP314, KS 1/4 Antigen, ACSTD1; GenBank: AAH14785.1); EphA3 (EPH Receptor A3, ETK1, ETK, TYRO4, HEK, Eph-Like Tyrosine Kinase 1, Tyrosine-Protein Kinase Receptor ETK1, EK4, EPH-Like Kinase 4, EC 2.7.10.1, EPHA3, HEK4, Ephrin Type-A Receptor 3, Human Embryo Kinase 1, TYRO4 Protein Tyrosine Kinase, hEK4, Human Embryo Kinase, Tyrosine-Protein Kinase TYRO4, EC 2.7.10; GenBank: AAH63282.1); EphB2R; Epiregulin (EREG, ER, proepiregulin; GenBank: AAI36405.1); ETBR (EDNRB, Endothelin Receptor Type B, HSCR2, HSCR, Endothelin Receptor Non-Selective Type, ET-B, ET-BR, ETRB, ABCDS, WS4A, ETB, Endothelin B Receptor; NP); ETV6-AML1 fusion protein; EZH2 (Enhancer Of Zeste Homolog 2 (Drosophila), Lysine N-Methyltransferase 6, ENX-1, KMT6 EC 2.1.1.43, EZH1, WVS, Enhancer Of Zeste (Drosophila) Homolog 2, ENX1, EZH2b, KMT6A, WVS2, Histone-Lysine N-Methyltransferase EZH2, Enhancer Of Zeste Homolog 2, EC 2.1.1; GenBank: AAH10858.1); FcRH1 (FCRL1, Fc Receptor-Like 1, FCRH1, Fc Receptor Homolog 1, FcR-Like Protein 1, Immune Receptor Translocation-Associated Protein 5, IFGP1, IRTA5, hIFGP1, IFGP Family Protein 1, CD307a, Fc Receptor-Like Protein 1, Immunoglobulin Superfamily Fc Receptor, Gp42, FcRL1, CD307a Antigen; GenBank: AAH33690.1); FcRH2 (FCRL2, Fc Receptor-Like 2, SPAP1, SH2 Domain-Containing Phosphatase Anchor Protein 1, Fc Receptor Homolog 2, FcR-Like Protein 2, Immunoglobulin Receptor Translocation-Associated Protein 4, FCRH2, IFGP4, IRTA4, IFGP Family Protein 4, SPAP1A, SPAP1 B, SPAPIC, CD307b, Fc Receptor-Like Protein 2, Immune Receptor Translocation-Associated Protein 4, Immunoglobulin Superfamily Fc Receptor, Gp42, SH2 Domain Containing Phosphatase Anchor Protein 1, FcRL2, CD307b Antigen; GenBank: AAQ88497.1); FcRH5 (FCRL5, Fc Receptor-Like 5, IRTA2, Fc Receptor Homolog 5, FcR-Like Protein 5, Immune Receptor Translocation-Associated Protein 2, BXMAS1, FCRH5, CD307, CD307e, PRO820, Fc Receptor-Like Protein 5, Immunoglobulin Superfamily Receptor Translocation Associated 2 (IRTA2), FCRL5, CD307e Antigen; GenBank: AAI01070.1); FLT3-ITD; FN1(Fibronectin 1, Cold-Insoluble Globulin, FN, Migration-Stimulating Factor, CIG, FNZ, GFND2, LETS, ED-B, FINC, GFND, MSF, fibronectin; GenBank: AAI43764.1); G250 (MN, CAIX, Carbonic Anhydrase IX, Carbonic Dehydratase, RCC-Associated Protein G250, Carbonate Dehydratase IX, Membrane Antigen MN, Renal Cell Carcinoma-Associated Antigen G250, CA-IX, P54/58N, pMW1, RCC-Associated Antigen G250, Carbonic Anhydrase 9; NP);—alias results for “G250” not “G250/MN/CAIX”; GAGE-1,2,8; GAGE-3,4,5,6,7; GDNF-Ral (GDNF family receptor alpha 1; GFRA1; GDNFR; GDNFRA; RETL1; TRNR1; RET1 L; GDNFR-alphal; GFR-ALPHA-; U95847; BC014962; NM-145793 NM-005264); GEDA (Genbank accession No. AY26076); GFRA1-GDNF family receptor alpha-1; GDNF receptor alpha-1; GDNFR-alpha-1; GFR-alpha-1; RET ligand 1; TGF-beta-related neurotrophic factor receptor 1 [Homo sapiens]; ProtKB/Swiss-Prot: P56159.2; glypican-3 (GPC3, Glypican 3, SDYS, Glypican Proteoglycan 3, Intestinal Protein OCI-5, GTR2-2, MXR7, SGBS1, DGSX, OCI-5. SGB, SGBS, Heparan Sulphate Proteoglycan, Secreted Glypican-3, OCI5; GenBank: AAH35972.1); GnTVf; gp100 (PMEL, Premelanosome Protein, SILV, D12S53E, PMEL17, SIL, Melanocyte Protein Pmel 17, Melanocytes Lineage-Specific Antigen GP100, Melanoma-Associated ME20 Antigen, Silver Locus Protein Homolog, ME20-M, ME20M, P1, P100, Silver (Mouse Homolog) Like, Silver Homolog (Mouse), ME20, SI, Melanocyte Protein Mel 17, Melanocyte Protein PMEL, Melanosomal Matrix Proteinl7, Silver, Mouse, Homolog Of; GenBank: AAC60634.1); GPC; GPNMB (Glycoprotein (Transmembrane) Nmb, Glycoprotein NMB, Glycoprotein Nmb-Like Protein, osteoactivin, Transmembrane Glycoprotein HGFIN, HGFIN, NMB, Transmembrane Glycoprotein, Transmembrane Glycoprotein NMB; GenBank: AAH32783.1); GPR172A (G protein-coupled receptor 172A; GPCR41; FLJ11856; D15Ertd747e); NP-078807.1; NM-024531.3); GPR19 (G protein-coupled receptor 19; Mm.478; NP-006134.1; NM-006143.2); GPR54 (KISS1 receptor; KISS1R; GPR54; HOT7T175; AXOR1; NP-115940.2; NM-032551.4); HAVCR1 (Hepatitis A Virus Cellular Receptor 1, T-Cell Immunoglobulin Mucin Family Member 1, Kidney Injury Molecule 1, KIM-1, KIM1, TIM, TIM-1, TIM1, TIMD-1, TIMD1, T-Cell Immunoglobulin Mucin Receptor 1, T-Cell Membrane Protein 1, HAVCR, HAVCR-1, T Cell Immunoglobin Domain And Mucin Domain Protein 1, HAVcr-1, T-Cell Immunoglobulin And Mucin Domain-Containing Protein 1; GenBank: AAH13325.1); HER2 (ERBB2, V-Erb-B2 Avian Erythroblastic Leukemia Viral Oncogene Homolog 2, NGL, NEU, Neuro/Glioblastoma Derived Oncogene Homolog, Metastatic Lymph Node Gene 19 Protein, Proto-Oncogene C-ErbB-2, Proto-Oncogene Neu, Tyrosine Kinase-Type Cell Surface Receptor HER2, MLN 19, p185erbB2, EC 2.7.10.1, V-Erb-B2 Avian Erythroblastic Leukemia Viral Oncogene Homolog 2 (Neuro/Glioblastoma Derived Oncogene Homolog), CD340, HER-2, HER-2/neu, TKR1, C-Erb B2/Neu Protein, herstatin, Neuroblastoma/Glioblastoma Derived Oncogene Homolog, Receptor Tyrosine-Protein Kinase ErbB-2, V-Erb-B2 Erythroblastic Leukemia Viral Oncogene Homolog 2, Neuro/Glioblastoma Derived Oncogene Homolog, MLN19, CD340 Antigen, EC 2.7.10; NP); HER-2/neu-alias of above; HERV-K-MEL; HLA-DOB (Beta subunit of MHC class II molecule (la antigen) that binds peptides and presents them to CD4+T lymphocytes); 273 aa, al: 6.56, MW: 30820.TM: 1 [P] Gene Chromosome: 6p21.3, Genbank accession No. NP-002111); hsp70-2 (HSPA2, Heat Shock 70 kDa Protein 2, Heat Shock 70 kD Protein 2, HSP70-3, Heat Shock-Related 70 KDa Protein 2, Heat Shock 70 KDa Protein 2; GenBank: AAD21815.1); IDO1 (Indoleamine 2,3-Dioxygenase 1, IDO, INDO, Indoleamine-Pyrrole 2,3-Dioxygenase, IDO-1, Indoleamine-Pyrrole 2,3 Dioxygenase, Indolamine 2,3 Dioxygenase, Indole 2,3 Dioxygenase, EC 1.13.11.52; NCBI Reference Sequence: NP-002155.1); IGF2B3; IL13Ralpha2 (IL13RA2, Interleukin 13 Receptor, Alpha 2, Cancer/Testis Antigen 19, Interleukin-13-Binding Protein, IL-13R-alpha-2, IL-13RA2, IL-13 Receptor Subunit Alpha-2, IL-13R Subunit Alpha-2, CD213A2, CT19, IL-13R, IL13BP, Interleukin 13 Binding Protein, Interleukin 13 Receptor Alpha 2 Chain, Interleukin-13 Receptor Subunit Alpha-2, IL13R, CD213a2 Antigen; NP); IL20Rα; Intestinal carboxyl esterase; IRTA2 (alias of FcRH5); Kallikrein 4 (KLK4, Kallikrein-Related Peptidase 4, PRSS17, EMSP1, Enamel Matrix Serine Proteinase 1, Kallikrein-Like Protein 1, Serine Protease 17, KLK-L1, PSTS, AI2A1, Kallikrein 4 (Prostase, Enamel Matrix, Prostate), ARM1, EMSP, Androgen-Regulated Message 1, Enamel Matrix Serine Protease 1, kallikrein, kallikrein-4, prostase, EC 3.4.21.-, Prostase, EC 3.4.21; GenBank: AAX30051.1); KIF20A (Kinesin Family Member 20A, RAB6KIFL, RAB6 Interacting, Kinesin-Like (Rabkinesin6), Mitotic a; LAGE-1; LDLR-fucosyltransferaseASfusion protein; Lengsin (LGSN, Lengsin, Lens Protein With Glutamine Synthetase Domain, GLULD1, Glutamate-Ammonia Ligase Domain-Containing Protein 1, LGS, Glutamate-Ammonia Ligase (Glutamine Synthetase) Domain Containing 1, Glutamate-Ammonia Ligase (Glutamine Synthase) Domain Containing 1, Lens Glutamine Synthase-Like; GenBank: AAF61255.1); LGR5 (leucine-rich repeat-containing G protein-coupled receptor 5; GPR49, GPR6; NP-003658.1; NM-003667.2; LY64 (Lymphocyte antigen 64 (RP10, type I membrane protein of the leucine rich repeat (LRR) family, regulates B-cell activation and apoptosis, loss of function is associated with increased disease activity in patients with systemic lupus erythematosis); 661 aa, al: 6.20, MW: 74147 TM: 1 [P] Gene Chromosome: 5q12, Genbank accession No. NP-005573.; Ly6E (lymphocyte antigen 6 complex, locus E; Ly67, RIG-E,SCA-2, TSA-; NP-002337.1; NM-002346.2); Ly6G6D (lymphocyte antigen 6 complex, locus G6D; Ly6-D, MEGT; NP-067079.2; NM-021246.2); LY6K (lymphocyte antigen 6 complex, locus K; LY6K; HSJ001348; FLJ3522; NP-059997.3; NM-017527.3); LyPD1-LY6/PLAUR domain containing 1, PHTS [Homo sapiens], GenBank: AAH17318.1); MAGE-A1 (Melanoma Antigen Family A, 1 (Directs Expression Of Antigen MZ2-E, MAGE1, Melanoma Antigen Family A 1, MAGEA1, Melanoma Antigen MAGE-1, Melanoma-Associated Antigen 1, Melanoma-Associated Antigen MZ2-E, Antigen MZ2-E, Cancer/Testis Antigen 1.1, CT1.1, MAGE-1 Antigen, Cancer/Testis Antigen Family 1, Member 1, Cancer/Testis Antigen Family 1, Member 1, MAGE1A; NCBI Reference Sequence: NP-004979.3); MAGE-A10 (MAGEA10, Melanoma Antigen Family A, 10, MAGE10, MAGE-10 Antigen, Melanoma-Associated Antigen 10, Cancer/Testis Antigen 1.10, CT1.10, Cancer/Testis Antigen Family 1, Member 10, Cancer/Testis Antigen Family 1, Member 10; NCBI Reference Sequence: NP-001238757.1); MAGE-A12 (MAGEA12, Melanoma Antigen Family A, 12, MAGE12, Cancer/Testis Antigen 1.12, CT1.12, MAGE12F Antigen, Cancer/Testis Antigen Family 1, Member 12, Cancer/Testis Antigen Family 1, Member 12, Melanoma-Associated Antigen 12, MAGE-12 Antigen; NCBI Reference Sequence: NP-001159859.1); MAGE-A2 (MAGEA2, Melanoma Antigen Family A, 2, MAGE2, Cancer/Testis Antigen 1.2, CT1.2, MAGEA2A, MAGE-2 Antigen, Cancer/Testis Antigen Family 1, Member 2, Cancer/Testis Antigen Family 1, Member 2, Melanoma Antigen 2, Melanoma-Associated Antigen 2; NCBI Reference Sequence: NP-001269434.1); MAGE-A3 (MAGEA3, Melanoma Antigen Family A, 3, MAGE3, MAGE-3 Antigen, Antigen MZ2-D, Melanoma-Associated Antigen 3, Cancer/Testis Antigen 1.3, CT1.3, Cancer/Testis Antigen Family 1, Member 3, HIPS, HYPD, MAGEA6, Cancer/Testis Antigen Family 1, Member 3; NCBI Reference Sequence: NP-005353.1); MAGE-A4 (MAGEA4, Melanoma Antigen Family A, 4, MAGE4, Melanoma-Associated Antigen 4, Cancer/Testis Antigen 1.4, CT1.4, MAGE-4 Antigen, MAGE-41 Antigen, MAGE-X2 Antigen, MAGE4A, MAGE4B, Cancer/Testis Antigen Family 1, Member 4, MAGE-41, MAGE-X2, Cancer/Testis Antigen Family 1, Member 4; NCBI Reference Sequence: NP-001011550.1); MAGE-A6 (MAGEA6, Melanoma Antigen Family A, 6, MAGE6, MAGE-6 Antigen, Melanoma-Associated Antigen 6, Cancer/Testis Antigen 1.6, CT1.6, MAGE3B Antigen, Cancer/Testis Antigen Family 1, Melanoma Antigen Family A 6, Member 6, MAGE-3b, MAGE3B, Cancer/Testis Antigen Family 1, Member 6; NCBI Reference Sequence: NP-787064.1); MAGE-A9 (MAGEA9, Melanoma Antigen Family A, 9, MAGE9, MAGE-9 Antigen, Melanoma-Associated Antigen 9, Cancer/Testis Antigen 1.9, CT1.9, Cancer/Testis Antigen Family 1, Member 9, Cancer/Testis Antigen Family 1, Member 9, MAGEA9A; NCBI Reference Sequence: NP-005356.1); MAGE-C1 (MAGEC1, Melanoma Antigen Family C, 1, Cancer/Testis Antigen 7.1, CT7.1, MAGE-C1 Antigen, Cancer/Testis Antigen Family 7, Member 1, CT7, Cancer/Testis Antigen Family 7, Member 1, Melanoma-Associated Antigen C1; NCBI Reference Sequence: NP-005453.2); MAGE-C2 (MAGEC2, Melanoma Antigen Family C, 2, MAGEE1, Cancer/Testis Antigen 10, CT10, HCA587, Melanoma Antigen, Family E, 1, Cancer/Testis Specific, Hepatocellular Carcinoma-Associated Antigen 587, MAGE-C2 Antigen, MAGE-E1 Antigen, Hepatocellular Cancer Antigen 587, Melanoma-Associated Antigen C2; NCBI Reference Sequence: NP-057333.1); mammaglobin-A (SCGB2A2, Secretoglobin, Family 2A, Member 2, MGB1, Mammaglobin 1, UGB2, Mammaglobin A, mammaglobin-A, Mammaglobin-1, Secretoglobin Family 2A Member 2; NP); MART2 (H HAT, Hedgehog Acyltransferase, SKI1, Melanoma Antigen Recognized By T-Cells 2, Skinny Hedgehog Protein 1, Skn, Melanoma Antigen Recognized By T Cells 2, Protein-Cysteine N-Palmitoyltransferase HHAT, EC 2.3.1.-; GenBank: AAH39071.1); M-CSF (CSF1, Colony Stimulating Factor 1 (Macrophage), MCSF, CSF-1, lanimostim, Macrophage Colony-Stimulating Factor 1, Lanimostim; GenBank: AAH21117.1); MCSP (SMCP, Sperm Mitochondria-Associated Cysteine-Rich Protein, MCS, Mitochondrial Capsule Selenoprotein, HSMCSGEN1, Sperm Mitochondrial-Associated Cysteine-Rich Protein; NCBI Reference Sequence: NP-109588.2); XAGE-lb/GAGED2a; WT1 (Wilms Tumor 1, WAGR, GUD, WIT-2, WT33, Amino-Terminal Domain Of EWS, NPHS4, Last Three Zinc Fingers Of The DNA-Binding Domain Of WT 1, AWT 1, Wilms Tumor Protein, EWS-WT1; GenBank: AAB33443.1); VEGF; Tyrosinase (TYR; OCAIA; OCA1A; tyrosinase; SHEP; NP-000363.1; NM-000372.4; GenBank: AAB60319.1); TrpM4 (BR22450, FLJ20041, TRPM4, TRPM4B, transient receptor potential cation channel, subfamily M, member 4, Genbank accession no. NM-01763); TRP2-INT2; TRP-2; TRP-1/gp75 (Tyrosinase-Related Protein 1, 5,6-Dihydroxyindole-2-Carboxylic Acid Oxidase, CAS2, CATB, TYRP, OCAS, Catalase B, b-PROTEIN, Glycoprotein 75, EC 1.14.18., Melanoma Antigen Gp75, TYRP1, TRP, TYRRP, TRP1, SHEP11, DHICA Oxidase, EC 1.14.18, GP75, EC 1.14.18.1; Triosephosphate isomerase (Triosephosphate isomerase 1, TPID, Triose-Phosphate Isomerase, HEL-S-49, TIM, Epididymis Secretory Protein Li 49, TPI, Triosephosphate Isomerase, EC 5.3.1.1; TRAG-3 (CSAG Family Member 2, Cancer/Testis Antigen Family 24, CSAG3B, Member 2, CSAG Family Member 3B, Cancer/Testis Antigen Family 24 Member 2, Cancer/Testis Antigen 24.2, Chondrosarcoma-Associated Gene 2/3 Protein, Taxol-Resistant-Associated Gene 3 Protein, Chondrosarcoma-Associated Gene 2/3 Protein-Like, CT24.2, Taxol Resistance Associated Gene 3, TRAG-3, CSAG3A, TRAG3;); TMEM46 (shisa homolog 2 (Xenopus laevis); SHISA; NP-001007539.1; NM-001007538.1; TMEM118 (ring finger protein, transmembrane2; RNFT2; FLJ1462; NP-001103373.1; NM-001109903.1; TMEFF1 (transmembrane protein with EGF-like and two follistatin-like domains 1; Tomoregulin-; H7365; C9orf2; C9ORF2; U19878; X83961; NM-080655; NM-003692; TGF-betaRII (TGFBR2, Transforming Growth Factor, Beta Receptor II (70/80 kDa), TGFbeta-RII, MFS2, tbetaR-II, TGFR-2, TGF-Beta Receptor Type IIB, TGF-Beta Type II Receptor, TGF-Beta Receptor Type-2, EC 2.7.11.30, Transforming Growth Factor Beta Receptor Type IIC, AAT3, TbetaR-II, Transforming Growth Factor, Beta Receptor II (70-80 kD), TGF-Beta Receptor Type II, FAA3, Transforming Growth Factor-Beta Receptor Type II, LDS1 B, HNPCC6, LDS2B, LDS2, RITC, EC 2.7.11, TAAD2; TENB2 (TMEFF2, tomoregulin, TPEF, HPP1, TR, putative transmembrane proteoglycan, related to the EGF/heregulin family of growth factors and follistatin); 374 aa, NCBI Accession: AAD55776, AAF91397, AAG49451, NCBI RefSeq: NP-057276; NCBI Gene: 23671; OMIM: 605734; SwissProt Q9UIK5; Genbank accession No. AF179274; AY358907, CAF85723, CQ782436; TAG-2; TAG-1 (Contactin 2 (Axonal), TAG-1, AXT, Axonin-1 Cell Adhesion Molecule, TAX, Contactin 2 (transiently Expressed), TAXI, Contactin-2, Axonal Glycoprotein TAG-1, Transiently-Expressed Axonal Glycoprotein, Transient Axonal Glycoprotein, Axonin-1, TAX-1, TAG1, FAMES; PRF: 444868); SYT-SSX1 or -SSX2 fusion protein; survivin; STEAP2 (HGNC 8639, IPCA-1, PCANAP1, STAMP1, STEAP2, STMP, prostate cancer associated gene 1, prostate cancer associated protein 1, six transmembrane epithelial antigen of prostate 2, six transmembrane prostate protein, Genbank accession no. AF45513; STEAP 1 (six transmembrane epithelial antigen of prostate, Genbank accession no. NM-01244; SSX-4; SSX-2 (SSX2, Synovial Sarcoma, X Breakpoint2, X Breakpoint 2, SSX, X Breakpoint 2B, Cancer/Testis Antigen 5.2, X-Chromosome-Related 2, Tumor Antigen HOM-MEL-40, CT5.2, HD21, Cancer/Testis Antigen Family 5, HOM-MEL-40, Isoform B, Cancer/Testis Antigen Family 5 member 2a, member 2a, Protein SSX2, Sarcoma, Sarcoma, Synovial, X-Chromosome-Related 2, synovial, Synovial Sarcoma, X Breakpoint 2B, Synovial Sarcomam, SSX2A; Sp17; SOX10 (SRY (Sex Determining Region Y)-Box 10, mouse, PCWH, DOM, WS4, WS2E, WS4C, Dominant Megacolon, mouse, Human Homolog Of, Dominant Megacolon, SRY-Related HMG-Box Gene 10, Human Homolog Of, transcription Factor SOX-10; GenBank: CAG30470.1); SNRPD1 (Small Nuclear Ribonucleoprotein D1, Small Nuclear Ribonucleoprotein D1, Polypeptide 16 kDa, Polypeptide (16 kD), SNRPD, HsT2456, Sm-D1, SMD 1, Sm-D Autoantigen, Small Nuclear Ribonucleoprotein D1 Polypeptide 16 kDa Pseudogene, SnRNP Core Protein D1, Small Nuclear Ribonucleoprotein Sm D1; SLC35D3 (Solute Carrier Family 35, Member D3, FRCL1, Fringe Connection-Like Protein 1, bA55K22.3, Frc, Fringe-Like 1, Solute Carrier Family 35 Member D3; NCBI GenBank: NC-000006.11 NC-018917.2 NT-025741.16); SIRT2 (Sirtuin 2, NAD-Dependent Deacetylase Sirtuin-2, SIRL2, Silent Information Regulator 2, Regulatory Protein SIR2 Homolog 2, Sir2-Related Protein Type 2, SIR2-Like Protein 2, Sirtuin Type 2, Sirtuin (Silent Mating Type Information Regulation 2 Homolog) 2 (S. cerevisiae), Sirtuin-2, Sirtuin (Silent Mating Type Information Regulation 2, S. cerevisiae, Homolog) 2, EC 3.5.1., SIR2; GenBank: AAK51133.1); Sema 5b (FLJ10372, KIAA1445, Mm.42015, SEMA5B, SEMAG, Semaphorin 5b Hlog, sema domain, seven thrombospondin repeats (type 1 and type 1-like), Transmembrane Domain™ and short cytoplasmic domain, (semaphorin) 5B, Genbank accession no. AB04087; secernin 1 (SCRN1, SES1, KIAA0193, secerin-1; GenBank: EAL24458.1); SAGE (SAGE1, Sarcoma Antigen 1, Cancer/Testis Antigen 14, CT14, Putative Tumor Antigen; NCBI Reference Sequence: NP-061136.2); RU2AS (KAAG1, Kidney Associated Antigen 1, RU2AS, RU2 Antisense Gene Protein, Kidney-Associated Antigen 1; GenBank: AAF23613.1); RNF43-E3 ubiquitin-protein ligase RNF43 precursor [Homo sapiens], RNF 124; URCC; NCBI Reference Sequence: NP-060233.3; RhoC (RGS5 (Regulator Of G-Protein Signaling 5, MSTP032, Regulator Of G-Protein Signalling 5, MSTP092, MST092, MSTP106, MST106, MSTP129, MST129; GenBank: AAB84001.1); RET (ret proto-oncogene; MEN2A; HSCR1; MEN2B; MTC1; PTC; CDHF12; Hs.168114; RET51; RET-ELE; NP-066124.1; NM-020975.4); RBAF600 (UBR4, Ubiquitin Protein Ligase E3 Component N-Recognin 4, Zinc Finger, UBR1 Type 1, ZUBR1, E3 Ubiquitin-Protein Ligase UBR4, RBAF600, 600 KDa Retinoblastoma Protein-Associated Factor, Zinc Finger UBR1-Type Protein 1, EC 6.3.2., N-recognin-4, KIAA0462, p600, EC 6.3.2, KIAA1307; GenBank: AAL83880.1); RAGE-1 (MOK, MOK Protein Kinase, Renal Tumor Antigen, RAGE, MAPK/MAK/MRK Overlapping Kinase, Renal Tumor Antigen 1, Renal Cell Carcinoma Antigen, RAGE-1, EC 2.7.11.22, RAGE1; UniProtKB/Swiss-Prot: Q9UQ07.1); RAB38/NY-MEL-1 (RAB38, NY-MEL-1, RAB38, Member RAS Oncogene Family, Melanoma Antigen NY-MEL-1, Rab-Related GTP-Binding Protein, Ras-Related Protein Rab-38, rrGTPbp; GenBank: AAH15808.1); PTPRK (DJ480J14.2.1 (Protein Tyrosine Phosphatase, Receptor Type, K R-PTP-KAPPA, Protein Tyrosine Phosphatase Kappa, Protein Tyrosine Phosphatase Kappa), Protein Tyrosine Phosphatase, Receptor Type, K, Protein-Tyrosine Phosphatase Kappa, Protein-Tyrosine Phosphatase, Receptor Type, Kappa, R-PTP-kappa, Receptor-Type Tyrosine-Protein Phosphatase Kappa, EC 3.1.3.48, PTPK; GenBank: AAI44514.1); PSMA; PSCA hIg(2700050C12Rik, C530008016Rik, RIKEN cDNA 2700050C12, RIKEN cDNA 2700050C12 gene, Genbank accession no. AY358628); PSCA (Prostate stem cell antigen precursor, Genbank accession no. AJ29743; PRDX5 (Peroxiredoxin 5, EC 1.11.1.15, TPx Type VI, B166, Antioxidant Enzyme B166, HEL-S-55, Liver Tissue 2D-Page Spot 71 B, PMP20, Peroxisomal Antioxidant Enzyme, PRDX6, Thioredoxin Peroxidase PMP20, PRXV, AOEB 166, Epididymis Secretory Protein Li 55, Alu Co-Repressor 1, Peroxiredoxin-5, Mitochondrial, Peroxiredoxin V, prx-V, Thioredoxin Reductase, Prx-V, ACR1, Alu Corepressor, PLP; GenBank: CAG33484.1); PRAME (Preferentially Expressed Antigen In Melanoma, Preferentially Expressed Antigen Of Melanoma, MAPE, 01P-4, OIPA, CT130, Cancer/Testis Antigen 130, Melanoma Antigen Preferentially Expressed In Tumors, Opa-Interacting Protein 4, Opa-Interacting Protein 01P4; GenBank: CAG30435.1); pml-RARalpha fusion protein; PMEL17 (silver homolog; SILV; D12S53E; PMEL17; SI; SIL); ME20; gp10 BC001414; BT007202; M32295; M77348; NM-006928; PBF (ZNF395, Zinc Finger Protein 395, PRF-1, Huntington disease regulatory, HD Gene Regulatory Region-Binding Protein, Region-Binding Protein 2, Protein 2, Papillomavirus Regulatory Factor 1, HD-Regulating Factor 2, Papillomavirus-Regulatory Factor, PRF1, HDBP-2, Si-1-8-14, HDBP2, Huntington'S Disease Gene Regulatory Region-Binding Protein 2, HDRF-2, Papillomavirus Regulatory Factor PRF-1, PBF; GenBank: AAH01237.1); PAX5 (Paired Box 5, Paired Box Homeotic Gene 5, BSAP, Paired Box Protein Pax-5, B-Cell Lineage Specific Activator, Paired Domain Gene 5, Paired Box Gene 5 (B-Cell Lineage Specific Activator Protein), B-Cell-Specific Transcription Factor, Paired Box Gene 5 (B-Cell Lineage Specific Activator); PAP (REG3A, Regenerating Islet-Derived 3 Alpha, INGAP, PAP-H, Hepatointestinal Pancreatic Protein, PBBCGF, Human Proislet Peptide, REG-Ill, Pancreatitis-Associated Protein 1, Regi, Reg III-Alpha, hepatocarcinoma-intestine-pancreas, Regenerating Islet-Derived Protein III-Alpha, Pancreatic Beta Cell Growth Factor, HIP, PAP Homologous Protein, HIP/PAP, Proliferation-Inducing Protein 34, PAP1, Proliferation-Inducing Protein 42, REG-3-alpha, Regenerating Islet-Derived Protein 3-Alpha, Pancreatitis-Associated Protein; GenBank: AAH36776.1); p53 (TP53, Tumor Protein P53, TPR53, P53, Cellular Tumor Antigen P53, Antigen NY-CO-13, Mutant Tumor Protein 53, Phosphoprotein P53, P53 Tumor Suppressor, BCC7, Transformation-Related Protein 53, LFS1, tumor Protein 53, Li-Fraumeni Syndrome, Tumor Suppressor P53; P2X5 (Purinergic receptor P2X ligand-gated ion channel 5, an ion channel gated by extracellular ATP, may be involved in synaptic transmission and neurogenesis, deficiency may contribute to the pathophysiology of idiopathic detrusor instability); 422 aa), al: 7.63, MW: 47206 TM: 1 [P] Gene Chromosome: 17p13.3, Genbank accession No. NP-002552.; OGT (0-Linked N-Acetylglucosamine (GlcNAc) Transferase, O-GlcNAc Transferase P110 Subunit, 0-Linked N-Acetylglucosamine (GlcNAc) Transferase (UDP-N-Acetylglucosamine:Polypeptide-N-Acetylglucosaminyl Transferase, UDP-N-Acetylglucosamine-Peptide N-Acetylglucosaminyltransferase 110 KDa Subunit, UDP-N-Acetylglucosamine:Polypeptide-N-Acetylglucosaminyl Transferase, Uridinediphospho-N-Acetylglucosamine:Polypeptide Beta-N-Acetylglucosaminyl Transferase, O-GlcNAc Transferase Subunit P110, EC 2.4.1.255, 0-Linked N-Acetylglucosamine Transferase 110 KDa Subunit, EC 2.4.1, HRNT1, EC 2.4.1.186, 0-GLCNAC; GenBank: AAH38180.1); OA1 (Osteoarthritis QTL 1, OASD; GenBank: CAA88742.1); NY-ESO-1/LAGE-2 (Cancer/Testis Antigen 1 B, CTAG1 B, NY-ESO-1, LAGE-2, ESO1, CTAG1, CTAG, LAGE2B, Cancer/Testis Antigen 1, Autoimmunogenic Cancer/Testis Antigen NY-ESO-1, Ancer Antigen 3, Cancer/Testis Antigen 6.1, New York Esophageal Squamous Cell Carcinoma 1, L Antigen Family Member 2, LAGE2, CT6.1, LAGE2A; GenBank: AAI30365.1); NY-BR-1 (ANKRD30A, Ankyrin Repeat Domain 30A, Breast Cancer Antigen NY-BR-1, Serologically Defined Breast Cancer Antigen NY-BR-1, Ankyrin Repeat Domain-Containing Protein 30A; NCBI Reference Sequence: NP-443723.2); N-ras (NRAS, Neuroblastoma RAS Viral (V-Ras) Oncogene Homolog, NRAS 1, Transforming Protein N-Ras, GTPase NRas, ALPS4, N-Ras Protein Part 4, NS6, Oncogene Homolog, HRAS 1; GenBank: AAH05219.1); NFYC (Nuclear Transcription Factor Y, Gamma, HAP5, HSM, Nuclear Transcription Factor Y Subunit C, Transactivator HSM-1/2, CCAAT Binding Factor Subunit C, NF-YC, CCAAT Transcription Binding Factor Subunit Gamma, CAAT Box DNA-Binding Protein Subunit C, Histone H1 Transcription Factor Large Subunit 2A, CBFC, Nuclear Transcription Factor Y Subunit Gamma, CBF-C, Transactivator HSM-1, H1TF2A, Transcription Factor NF-Y, C Subunit; neo-PAP (PAPOLG, Poly(A) Polymerase Gamma, Neo-Poly(A) Polymerase, Nuclear Poly(A) Polymerase Gamma, Polynucleotide Adenylyltransferase Gamma, SRP RNA 3′ Adenylating Enzyme/Pap2, PAP-gamma, Neo-PAP, SRP RNA 3′-Adenylating Enzyme, PAP2, EC 2.7.7.19, PAPG; NCBI Reference Sequence: NP-075045.2); NCA (CEACAM6, Genbank accession no. M1872); Napi3b (NAPI-3B, NPTIIb, SLC34A2, solute carrier family 34 (sodium phosphate), member 2, type II sodium-dependent phosphate transporter 3b, Genbank accession no. NM-00642); Myosin class I; MUM-3; MUM-2 (TRAPPC 1, Trafficking Protein Particle Complex 1, BETS, BETS Homolog, MUM2, Melanoma Ubiquitous Mutated 2, Multiple Myeloma Protein 2, Trafficking Protein Particle Complex Subunit 1; MUM-lf; Mucin (MUC1, Mucin 1, Cell Surface Associated, PEMT, PUM, CA 15-3, MCKD1, ADMCKD, Medullary Cystic Kidney Disease 1 (Autosomal Dominant), ADMCKD1, Mucin 1, Transmembrane, CD227, Breast Carcinoma-Associated Antigen DF3, MAM6, Cancer Antigen 15-3, MCD, Carcinoma-Associated Mucin, MCKD, Krebs Von Den Lungen-6, MUC-1/SEC, Peanut-Reactive Urinary Mucin, MUC1/ZD, Tumor-Associated Epithelial Membrane Antigen, DF3 Antigen, Tumor-Associated Mucin, episialin, EMA, H23 Antigen, H23AG, Mucin-1, KL-6, Tumor Associated Epithelial Mucin, MUC-1, Episialin, PEM, CD227 Antigen; UniProtKB/Swiss-Prot: P15941.3); MUCSAC (Mucin SAC, Oligomeric Mucus/Gel-Forming, Tracheobronchial Mucin′ MUC5, TBM, Mucin 5, Subtypes A And C, Tracheobronchial/Gastric, leB, Gastric Mucin, Mucin SAC, Oligomeric Mucus/Gel-Forming Pseudogene, Lewis B Blood Group Antigen, LeB, Major Airway Glycoprotein, MUC-SAC, Mucin-5 Subtype AC, Tracheobronchial; MUC1 (Mucin 1, Cell Surface Associated, PEMT, PUM, CA 15-3, MCKD1, ADMCKD, Medullary Cystic Kidney Disease 1 (Autosomal Dominant), ADMCKD1, Mucin 1, Transmembrane, CD227, Breast Carcinoma-Associated Antigen DF3, MAM6, Cancer Antigen 15-3, MCD, Carcinoma-Associated Mucin, MCKD, Krebs Von Den Lungen-6, MUC-1/SEC, Peanut-Reactive Urinary Mucin, MUC-1/X, Polymorphic Epithelial Mucin, MUC 1/ZD, Tumor-Associated Epithelial Membrane Antigen, DF3 Antigen, Tumor-Associated Mucin, episialin, EMA, h23 Antigen, H23AG, mucin-1, KL-6, Tumor Associated Epithelial Mucin, MUC-1, Episialin, PEM, CD227 Antigen; MSG783 (RNF 124, hypothetical protein FLJ20315, Genbank accession no. NM-01776; MRP4-multidrug resistance-associated protein 4 isoform 3, MOAT-B; MOATB [Homo sapiens]; NCBI Reference Sequence: NP-001288758.1; MPF (MPF, MSLN, SMR, megakaryocyte potentiating factor, mesothelin, Genbank accession no. NM-00582; MMP-7 (MMP7, matrilysin, MPSL1, matrin, Matrix Metalloproteinase 7 (Matrilysin, Uterine), Uterine Matrilysin, Matrix Metalloproteinase-7, EC 3.4.24.23, Pump-1 Protease, Matrin, Uterine Metalloproteinase, PUMP1, MMP-7, EC 3.4.24, PUMP-1; GenBank: AAC37543.1); MMP-2 (MMP2, Matrix Metallopeptidase 2 (Gelatinase A, 72 kDa Gelatinase, 72 kDa Type IV Collagenase), MONA, CLG4A, Matrix Metalloproteinase 2 (Gelatinase A, 72 kD Gelatinase, 72 kD Type IV Collagenase), CLG4, 72 kDa Gelatinase, 72 kDa Type IV Collagenase), Matrix Metalloproteinase-2, MMP-II, 72 KDa Gelatinase, Collagenase Type IV-A, MMP-2, Matrix Metalloproteinase-II, TBE-1, Neutrophil Gelatinase, EC 3.4.24.24, EC 3.4.24; GenBank: AAH02576.1); and Meloe.

[0217] In certain embodiments, the inventive CD3 binding domains and antibodies comprising them comprise a multispecific antibody, for example, a bispecific antibody wherein the multispecific antibody comprises a second binding domain having specificity for a second antigen selected from the group consisting of: 17-IA, 4-1BB, 4Dc, 6-keto-PGFla, 8-iso-PGF2a, 8-oxo-dG, A1 Adenosine Receptor, A33, ACE, ACE-2, Activin, Activin A, Activin AB, Activin B, Activin C, Activin RIA, Activin RIA ALK-2, Activin RIB ALK-4, Activin RIIA, Activin RUB, ADAM, ADAM10, ADAM12, ADAM15, ADAM17/TACE, ADAM8, ADAM9, ADAMTS, ADAMTS4, ADAMTS5, Addressins, aFGF, ALCAM, ALK, ALK-1, ALK-7, alpha-1-antitrypsin, alpha-V/beta-1 antagonist, ANG, Ang, APAF-1, APE, APJ, APP, APRIL, AR, ARC, ART, Artemin, anti-Id, ASPARTIC, Atrial natriuretic factor, av/b3 integrin, Axl, b2M, B7-1, B7-2, B7-H, B-lymphocyte Stimulator (BlyS), BACE, BACE-1, Bad, BAFF, BAFF-R, Bag-1, BAK, Bax, BCA-1, BCAM, Bel, BCMA, BDNF, b-ECGF, bFGF, BID, Bik, BIM, BLC, BL-CAM, BLK, BMP, BMP-2 BMP-2a, BMP-3 Osteogenin, BMP-4 BMP-2b, BMP-5, BMP-6 Vgr-1, BMP-7 (OP-1), BMP-8 (BMP-8a, OP-2), BMPR, BMPR-IA (ALK-3), BMPR-IB (ALK-6), BRK-2, RPK-1, BMPR-II (BRK-3), BMPs, b-NGF, BOK, Bombesin, Bone-derived neurotrophic factor, BPDE, BPDE-DNA, BTC, complement factor 3 (C3), C3a, C4, C5, C5a, CIO, CA125, CAD-8, Calcitonin, cAMP, carcinoembryonic antigen (CEA), carcinoma-associated antigen, Cathepsin A, Cathepsin B, Cathepsin C/DPPI, Cathepsin D, Cathepsin E, Cathepsin H, Cathepsin L, Cathepsin O, Cathepsin S, Cathepsin V, Cathepsin X/Z/P, CBL, CCI, CCK2, CCL, CCL1, CCLll, CCL12, CCL13, CCL 14, CCL15, CCL16, CCL1 7, CCL18, CCL19, CCL2, CCL20, CCL21, CCL22, CCL23, CCL24, CCL25, CCL26, CCL27, CCL28, CCL3, CCL4, CCL5, CCL6, CCL7, CCL8, CCL9/10, CCR, CCR1, CCR10, CCR10, CCR2, CCR3, CCR4, CCR5, CCR6, CCR7, CCR8, CCR9, CD1, CD2, CD4, CD5, CD6, CD7, CD8, CD10, CDlla, CDllb, CDllc, CD13, CD14, CD15, CD16, CD18, CD19, CD20, CD21, CD22, CD23, CD25, CD27L, CD28, CD29, CD30, CD30L, CD32, CD33 (p67 proteins), CD34, CD38, CD40, CD40L, CD44, CD45, CD46, CD49a, CD52, CD54, CD55, CD56, CD61, CD64, CD66e, CD74, CD80 (B7-1), CD89, CD95, CD123, CD137, CD138, CD140a, CD146, CD147, CD148, CD152, CD164, CEACAM5, CFTR, cGMP, CINC, Clostridium botulinum toxin, Clostridium perfringens toxin, CKb8-1, CLC, CMV, CMV UL, CNTF, CNTN-1, COX, C-Ret, CRG-2, CT-1, CTACK, CTGF, CTLA-4, CX3CL1, CX3CR1, CXCL, CXCL1, CXCL2, CXCL3, CXCL4, CXCL5, CXCL6, CXCL7, CXCL8, CXCL9, CXCL10, CXCL11, CXCL12, CXCL13, CXCL14, CXCL15, CXCL16, CXCR, CXCR1, CXCR2, CXCR3, CXCR4, CXCR5, CXCR6, cytokeratin tumor-associated antigen, DAN, DCC, DcR3, DC-SIGN, Decay accelerating factor, des(1-3)-IGF-I (brain IGF-1), Dhh, digoxin, DNAM-1, Dnase, Dpp, DPPIV/CD26, Dtk, ECAD, EDA, EDA-A1, EDA-A2, EDAR, EGF, EGFR (ErbB-1), EMA, EMMPRIN, EN A, endothelin receptor, Enkephalinase, eNOS, Eot, eotaxinl, EpCAM, Ephrin B2/EphB4, EPO, ERCC, E-selectin, ET-1, Factor Ila, Factor VII, Factor VIIIc, Factor IX, fibroblast activation protein (FAP), Fas, FcRI, FEN-1, Ferritin, FGF, FGF-19, FGF-2, FGF3, FGF-8, FGFR, FGFR-3, Fibrin, FL, FLIP, Flt-3, Flt-4, Follicle stimulating hormone, Fractalkine, FZD1, FZD2, FZD3, FZD4, FZD5, FZD6, FZD7, FZD8, FZD9, FZD10, G250, Gas 6, GCP-2, GCSF, GD2, GD3, GDF, GDF-1, GDF-3 (Vgr-2), GDF-5 (BMP-14, CDMP-1), GDF-6 (BMP-13, CDMP-2), GDF-7 (BMP-12, CDMP-3), GDF-8 (Myostatin), GDF-9, GDF-15 (MIC-1), GDNF, GDNF, GFAP, GFRa-1, GFR-alphal, GFR-alpha2, GFR-alpha3, GITR, Glucagon, Glut 4, glycoprotein Ilb/IIIa (GP Ilb/IIIa), GM-CSF, gp130, gp72, GRO, Growth hormone releasing factor, Hapten (NP-cap or NIP-cap), HB-EGF, HCC, HCMV gB envelope glycoprotein, HCMV) gH envelope glycoprotein, HCMV UL, Hemopoietic growth factor (HGF), Hep B gp120, heparanase, Her2, Her2/neu (ErbB-2), Her3 (ErbB-3), Her4 (ErbB-4), herpes simplex virus (HSV) gB glycoprotein, HSV gD glycoprotein, HGFA, High molecular weight melanoma-associated antigen (HMW-MAA), HIV gp120, HIV IIIB gp 120 V3 loop, HLA, HLA-DR, HM1.24, HMFG PEM, HRG, Hrk, human cardiac myosin, human cytomegalovirus (HCMV), human growth hormone (HGH), HVEM, 1-309, IAP, ICAM, ICAM-1, ICAM-3, ICE, ICOS, IFNg, Ig, IgA receptor, IgE, IGF, IGF binding proteins, IGF-1R, IGFBP, IGF-I, IGF-II, IL, IL-1, IL-1R, IL-2, IL-2R, IL-4, IL-4R, IL-5, IL-5R, IL-6, IL-6R, IL-8, IL-9, IL-10, IL-12, IL-13, IL-15, IL-18, IL-18R, IL-23, interferon (INF)-alpha, INF-beta, INF-gamma, Inhibin, iNOS, Insulin A-chain, Insulin B-chain, Insulin-like growth factor 1, integrin alpha2, integrin alpha3, integrin alpha4, integrin alpha4/betal, integrin, alpha4/beta7, integrin alpha5 (alphaV), integrin alpha5/betal, integrin alpha5/beta3, integrin alpha6, integrin betal, integrin beta2, interferon gamma, IP-10, 1-TAC, JE, Kallikrein 2, Kallikrein 5, Kallikrein 6, Kallikrein 11, Kallikrein 12, Kallikrein 14, Kallikrein 15, Kallikrein LI, Kallikrein L2, Kallikrein L3, Kallikrein L4, KC, KDR, Keratinocyte Growth Factor (KGF), laminin 5, LAMP, LAP, LAP (TGF-1), Latent TGF-1, Latent TGF-1 bpl, LBP, LDGF, LECT2, Lefty, Lewis-Y antigen, Lewis-Y related antigen, LFA-1, LFA-3, Lfo, LIF, LIGHT, lipoproteins, LIX, LKN, Lptn, L-Selectin, LT-a, LT-b, LTB4, LTBP-1, Lung surfactant, Luteinizing hormone, Lymphotoxin Beta Receptor, Mac-1, MAdCAM, MAG, MAP2, MARC, MCAM, MCAM, MCK-2, MCP, M-CSF, MDC, Mer, METALLOPROTEASES, MGDF receptor, MGMT, MHC (HLA-DR), MIF, MIG, MIP, MIP-1-alpha, MK, MMAC1, MMP, MMP-1, MMP-10, MMP-11, MMP-12, MMP-13, MMP-14, MMP-15, MMP-2, MMP-24, MMP-3, MMP-7, MMP-8, MMP-9, MPIF, Mpo, MSK, MSP, mucin (Mucl), MUC 18, Muellerian-inhibitin substance, Mug, MuSK, NAIP, NAP, NCAD, N-Cadherin, NCA 90, NCAM, NCAM, Neprilysin, Neurotrophin-3,-4, or -6, Neurturin, Neuronal growth factor (NGF), NGFR, NGF-beta, nNOS, NO, NOS, Npn, NRG-3, NT, NTN, OB, OGG1, OPG, OPN, OSM, OX40L, OX40R, p150, p95, PADPr, Parathyroid hormone, PARC, PARP, PBR, PBSF, PCAD, P-Cadherin, PCNA, PDGF, PDGF, PDK-1, PECAM, PEM, PF4, PGE, PGF, PGI2, PGJ2, PIN, PLA2, placental alkaline phosphatase (PLAP), P1GF, PLP, PP14, Proinsulin, Prorelaxin, Protein C, PS, PSA, PSCA, prostate specific membrane antigen (PSMA), PTEN, PTHrp, Ptk, PTN, R51, RANK, RANKL, RANTES, RANTES, Relaxin A-chain, Relaxin B-chain, renin, respiratory syncytial virus (RSV) F, RSV Fgp, Ret, Rheumatoid factors, RLIP76, RPA2, RSK, S100, SCF/KL, SDF-1, SERINE, Serum albumin, sFRP-3, Shh, SIGIRR, SK-1, SLAM, SLPI, SMAC, SMDF, SMOH, SOD, SPARC, Stat, STEAP, STEAP-II, TACE, TACI, TAG-72 (tumor-associated glycoprotein-72), TARC, TCA-3, T-cell receptors (e.g., T-cell receptor alpha/beta), TdT, TECK, TEM1, TEM5, TEM7, TEM8, TERT, testicular PLAP-like alkaline phosphatase, TfR, TGF, TGF-alpha, TGF-beta, TGF-beta Pan Specific, TGF-beta RI (ALK-5), TGF-beta RII, TGF-beta Rllb, TGF-beta RIII, TGF-betal, TGF-beta2, TGF-beta3, TGF-beta4, TGF-beta5, Thrombin, Thymus Ck-1, Thyroid stimulating hormone, Tie, TIMP, TIQ, Tissue Factor, TMEFF2, Tmpo, TMPRSS2, TNF, TNF-alpha, TNF-alpha beta, TNF-beta2, TNFc, TNF-RI, TNF-RII, TNFRSF10A (TRAIL R1 Apo-2, DR4), TNFRSFIOB (TRAIL R2 DR5, KILLER, TRICK-2A, TRICK-B), TNFRSF10C (TRAIL R3 DcR1, LIT, TRID), TNFRSF10D (TRAIL R4 DcR2, TRUNDD), TNFRSF11A (RANK ODF R, TRANCE R), TNFRSFllB (OPG OCIF, TR1), TNFRSF 12 (TWEAK R FN14), TNFRSF13B (TACI), TNFRSF13C (BAFF R), TNFRSF 14 (HVEM ATAR, HveA, LIGHT R, TR2), TNFRSF16 (NGFR p75NTR), TNFRSF17 (BCMA), TNFRSF 18 (GITR AITR), TNFRSF 19 (TROY TAJ, TRADE), TNFRSF 19L (RELT), TNFRSFIA (TNF RI CD120a, p55-60), TNFRSFIB (TNF RII CD120b, p75-80), TNFRSF26 (TNFRH3), TNFRSF3 (LTbR TNF RIII, TNFC R), TNFRSF4 (OX40 ACT35, TXGP1 R), TNFRSF5 (CD40 p50), TNFRSF6 (Fas Apo-1, APT1, CD95), TNFRSF6B (DcR3 M68, TR6), TNFRSF7 (CD27), TNFRSF8 (CD30), TNFRSF9 (4-1BB CD137, ILA), TNFRSF21 (DR6), TNFRSF22 (DcTRAIL R2 TNFRH2), TNFRST23 (DcTRAIL RI TNFRH1), TNFRSF25 (DR3 Apo-3, LARD, TR-3, TRAMP, WSL-1), TNFSF10 (TRAIL Apo-2 Ligand, TL2), TNFSF11 (TRANCE/RANK Ligand ODF, OPG Ligand), TNFSF 12 (TWEAK Apo-3 Ligand, DR3 Ligand), TNFSF13 (APRIL TALL2), TNFSF13B (BAFF BLYS, TALL1, THANK, TNFSF20), TNFSF14 (LIGHT HVEM Ligand, LTg), TNFSF15 (TL1A/VEGI), TNFSF 18 (GITR Ligand AITR Ligand, TL6), TNFSFIA (TNF-α Conectin, DIF, TNFSF2), TNFSF1B (TNF-b LTa, TNFSF1), TNFSF3 (LTb TNFC, p33), TNFSF4 (OX40 Ligand gp34, TXGP1), TNFSF5 (CD40 Ligand CD154, gp39, HIGM1, IMD3, TRAP), TNFSF6 (Fas Ligand Apo-1 Ligand, APT1 Ligand), TNFSF7 (CD27 Ligand CD70), TNFSF8 (CD30 Ligand CD153), TNFSF9 (4-1BB Ligand CD137 Ligand), TP-1, t-PA, Tpo, TRAIL, TRAIL R, TRAIL-R1, TRAIL-R2, TRANCE, transferring receptor, TRF, Trk, TROP-2, TSG, TSLP, tumor-associated antigen CA 125, tumor-associated antigen expressing Lewis Y related carbohydrate, TWEAK, TXB2, Ung, uPAR, uPAR-1, Urokinase, VCAM, VCAM-1, VECAD, VE-Cadherin, VE-cadherin-2, VEFGR-1 (fit-1), VEGF, VEGFR, VEGFR-3 (fit-4), VEGI, VIM, Viral antigens, VLA, VLA-1, VLA-4, VNR integrin, von Willebrands factor, WIF-1, WNT1, WNT2, WNT2B/13, WNT3, WNT3A, WNT4, WNT5A, WNT5B, WNT6, WNT7A, WNT7B, WNT8A, WNT8B, WNT9A, WNT9A, WNT9B, WNT10A, WNT10B, WNT11, WNT16, XCL1, XCL2, XCR1, XCR1, XEDAR, XIAP, XPD, CTLA4 (cytotoxic T lymphocyte antigen-4), PD1 (programmed cell death protein 1), PD-L1 (programmed cell death ligand 1), LAG-3 (lymphocyte activation gene-3), TIM-3 (T cell immunoglobulin and mucin protein-3), receptors for hormones, and growth factors.

[0218] In certain embodiments, the inventive CD3 binding domains and antibodies comprising them comprise a multispecific antibody, for example, a bispecific antibody wherein the multispecific antibody comprises a second binding domain having specificity for a second antigen selected from the group consisting of: BCMA, CTLA4 (cytotoxic T lymphocyte antigen-4), PD 1 (programmed cell death protein 1), PD-L1 (programmed cell death ligand 1), LAG-3 (lymphocyte activation gene-3), TIM-3, CD20, CD2, CD19, Her2, EGFR, EpCAM, FcyRIIIa (CD16), FcyRIIa (CD32a), FcyRIIb (CD32b), FcyRI (CD64), Toll-like receptors (TLRs), TLR4, TLR9, cytokines, IL-2, IL-5, L-13, L-6, L-17, L-12, IL-23, TNFα, TGFb, cytokine receptors, IL-2R, chemokines, chemokine receptors, growth factors, VEGF, and HGF.

[0219] In some embodiments, the invention provides bispecific antibodies having affinity to CD3 and HER2. In some embodiments, the invention provides bispecific antibodies comprising an antibody fragment (e.g., an Fab) of trastuzumab. Exemplary bispecific CD3 antibodies include ADI-29291, ADI-29292, ADI-29293, ADI-29294, ADI-29295, ADI-29297, ADI-29298, ADI-29300, ADI-29301, ADI-29302, ADI-29303, ADI-29304, ADI-29305, and ADI-29306.

[0220] In certain embodiments, the inventive CD3 binding domains and antibodies comprising them may be prepared according to a variety of techniques available to the artisan and include, but are not limited to, recombinant co-expression of two immunoglobulin heavy chain-light chain pairs having different specificities (see Milstein and Cuello, Nature 305: 537 (1983)), WO 93/08829, and Traunecker et al., EMBO J. 10: 3655 (1991)), and “knob-in-hole” engineering (see, e.g., U.S. Pat. No. 5,731,168). “Knob-in-hole” engineering of multispecific antibodies may be utilized to generate a first arm containing a knob and a second arm containing the hole into which the knob of the first arm may bind. The knob of the multispecific antibodies of the invention may be an anti-CD3 arm in one embodiment. Alternatively, the knob of the multispecific antibodies of the invention may be an anti-target/antigen arm in one embodiment. The hole of the multispecific antibodies of the invention may be an anti-CD3 arm in one embodiment. Alternatively, the hole of the multispecific antibodies of the invention may be an anti-target/antigen arm in one embodiment. Multispecific antibodies may also be engineered using immunoglobulin crossover (also known as Fab domain exchange or CrossMab format) technology (see e.g., WO2009/080253; Schaefer et al., Proc. Natl. Acad. Sci. USA, 108:11187-11192 (2011)). Multispecific antibodies may also be made by engineering electrostatic steering effects for making antibody Fc-heterodimeric molecules (WO 2009/089004A1); cross-linking two or more antibodies or fragments (see, e.g., U.S. Pat. No. 4,676,980, and Brennan et al., Science, 229: 81 (1985)); using leucine zippers to produce bi-specific antibodies (see, e.g., Kostelny et al., J. Immunol, 148(5):1547-1553 (1992)); using “diabody” technology for making bispecific antibody fragments (see, e.g., Hollinger et al., Proc. Natl. Acad. Sci. USA, 90:6444-6448 (1993)); and using single-chain Fv (sFv) dimers (see, e.g. Gruber et al., J. ImmunoL, 152:5368 (1994)); and preparing trispecific antibodies as described, e.g., in Tutt et al. J. ImmunoL 147: 60 (1991). Additional non-limiting examples of multispecific and bispecific formats that are amenable to incorporation of the inventive anti-CD3 binding domains include, e.g., Fab-Fc-scFv (“bottle-opener”) (XENCOR), Mab-scFv (XENCOR), Mab-Fv (XENCOR), Dual scFv (XENCOR),central Fv (XENCOR), central scFv(XENCOR), one-arm central scFv (XENCOR), Fab-Fab (XENCOR), Fab-Fv (XENCOR), mAb-Fv (XENCOR), mAb-Fab (XENCOR), DART (MacroGenics), BiTE (Amgen/Micromet), KiTE, common light chain-IgG (Genentech), TandAb (Affimed) Cross-Mab (Roche), SEED (EMD Serono), BEAT (Glenmark), TrioMab (Trion Pharma/Fresnius Biotech), DuetMab (MedImmune), and others. Methods for preparing such multispecific antibodies are disclosed in, for example: WO 95/09917; WO 2008/119566; WO 2008/119567; WO2011/121110; WO 2010/037835; WO 2007/042261; WO 2007/110205; WO 2011/121110; WO 2012/055961; WO 2012/16067; WO 2016/086189; WO 2016/182751; WO 2015/006749; WO 2014/049003; WO 2013/177101; WO 2015/128509; U.S. Pat. No. 7,951,917; US 2009/0252729; US 2014/0348839; U.S. Pat. No. 7,183,076; Mazor et al., Mabs, Vol. 7, pages 377-389 (2015); Muda et al., Protein Engineering, Designe, & Selection, Vol. 24, pages 447-454 (2011); and Del Bano et al., Antibodies, Vol. 5, pages 1-23 (2016).

[0221] Still further exemplary bispecific antibody format that can be used in the context of the present invention involves the use of a first immunoglobulin (Ig) CH3 domain and a second Ig CH3 domain, wherein the first and second Ig CH3 domains differ from one another by at least one amino acid, and wherein at least one amino acid difference reduces binding of the bi-specific antibody to Protein A as compared to a bi-specific antibody lacking the amino acid difference. In one embodiment, the first Ig CH3 domain binds Protein A and the second Ig CH3 domain contains a mutation that reduces or abolishes Protein A binding such as an H95R modification (by IMGT exon numbering; H435R by EU numbering). The second CH3 may further comprise a Y96F modification (by IMGT; Y436F by EU). Further modifications that may be found within the second CH3 include: D16E, L18M, N44S, K52N, V57M, and V821 (by IMGT; D356E, L358M, N384S, K392N, V397M, and V4221 by EU) in the case of IgG1 antibodies; N44S, K52N, and V821 (IMGT; N384S, K392N, and V4221 by EU) in the case of lgG2 antibodies; and Q15R, N44S, K52N, V57M, R69K, E79Q, and V821 (by IMGT; Q355R, N384S, K392N, V397M, R409K, E419Q, and V4221 by EU) in the case of lgG4 antibodies.

[0222] In certain embodiments, the inventive CD3 binding domains and antibodies comprising them may be prepared according as engineered antibodies with three or more functional antigen binding sites, including “Octopus antibodies,” as disclosed in, e.g. US 2006/0025576A1.

[0223] In certain embodiments, the inventive CD3 binding domains and antibodies comprising them may be prepared as a “Dual Acting FAb” or “DAF” comprising an antigen binding site that binds to CD3 as well as another, different antigen as disclosed in e.g., US 2008/0069820.

[0224] As disclosed herein and throughout, the inventive CD3 binding domains and antibodies comprising them may comprise monospecific, bispecific, or multispecific antibodies. Multispecific antibodies may be specific for different epitopes of one target polypeptide or may contain antigen-binding domains specific for more than one target polypeptide. See, e.g., Tutt et al., 1991, J. Immunol. 147:60-69; Kufer et al., 2004, Trends Biotechnol. 22:238-244. The antibodies of the present invention can be linked to or co-expressed with another functional molecule, e.g., another peptide or protein. For example, an antibody or fragment thereof can be functionally linked (e.g., by chemical coupling, genetic fusion, noncovalent association or otherwise) to one or more other molecular entities, such as another antibody or antibody fragment to produce a bi-specific or a multi-specific antibody with a second binding specificity.

[0225] In certain embodiments, amino acid sequence variants of the inventive CD3 binding domains and antibodies comprising them are contemplated. For example, it may be desirable to improve the binding affinity and/or other biological properties of the antibody. Amino acid sequence variants of an antibody may be prepared by introducing appropriate modifications into the nucleotide sequence encoding the antibody, or by peptide synthesis. Such modifications include, for example, deletions from, and/or insertions into and/or substitutions of residues within the amino acid sequences of the antibody. Any combination of deletion, insertion, and substitution can be made to arrive at the final construct, provided that the final construct possesses the desired characteristics, for example, antigen-binding. In certain embodiments, such variants having one or more amino acid substitutions are provided. Sites of interest for substitutional mutagenesis include the CDRs and FRs. Amino acid substitutions may be introduced into an antibody of interest and the products screened for a desired activity, for example, retained/improved antigen binding, decreased immunogenicity, or improved ADCC or CDC.

[0226] One type of substitutional variant involves substituting one or more hypervariable region residues of a parent antibody (e.g., a humanized or human antibody). Generally, the resulting variant(s) selected for further study will have modifications (e.g., improvements) in certain biological properties (e.g., increased affinity, reduced immunogenicity) relative to the parent antibody and/or will have substantially retained certain biological properties of the parent antibody. An exemplary substitutional variant is an affinity matured antibody, which may be conveniently generated, e.g., using phage display-based affinity maturation techniques. Briefly, one or more CDR residues are mutated and the variant antibodies displayed on phage and screened for a particular biological activity (e.g., binding affinity).

[0227] Alterations (e.g., substitutions) may be made in CDRs, e.g., to improve antibody affinity. Such alterations may be made in CDR “hotspots,” i.e., residues encoded by codons that undergo mutation at high frequency during the somatic maturation process (see, e.g., Chowdhury, Methods Mol. Biol. 207:179-196 (2008)), and/or residues that contact antigen, with the resulting variant VH or VL being tested for binding affinity. Affinity maturation by constructing and reselecting from secondary libraries has been described, e.g., in Hoogenboom et al. in Methods in Molecular Biology 178:1-37 (O'Brien et al., ed., Human Press, Totowa, N.J., (2001).) In some embodiments of affinity maturation, diversity is introduced into the variable genes chosen for maturation by any of a variety of methods (e.g., error-prone PCR, chain shuffling, or oligonucleotide-directed mutagenesis). A secondary library is then created. The library is then screened to identify any antibody variants with the desired affinity. Another method to introduce diversity involves CDR-directed approaches, in which several CDR residues (e.g., 4-6 residues at a time) are randomized. CDR residues involved in antigen binding may be specifically identified, e.g., using alanine scanning mutagenesis or modeling. CDR-H3 and CDR-L3 in particular are often targeted.

[0228] In certain embodiments, substitutions, insertions, or deletions may occur within one or more CDRs of the inventive CD3 binding domains and antibodies comprising them, so long as such alterations do not substantially reduce the ability of the antibody to bind antigen. For example, conservative alterations (e.g., conservative substitutions as provided herein) that do not substantially reduce binding affinity may be made in CDRs. Such alterations may, for example, be outside of antigen contacting residues in the CDRs. In certain embodiments of the variant VH and VL sequences provided above, each CDR either is unaltered, or contains no more than one, two or three amino acid substitutions.

[0229] A useful method for identification of residues or regions of an antibody that may be targeted for mutagenesis is called “alanine scanning mutagenesis” as described by Cunningham and Wells (1989) Science, 244:1081-1085. In this method, a residue or group of target residues (e.g., charged residues such as arg, asp, his, lys, and glu) are identified and replaced by a neutral or negatively charged amino acid (e.g., alanine or polyalanine) to determine whether the interaction of the antibody with antigen is affected. Further substitutions may be introduced at the amino acid locations demonstrating functional sensitivity to the initial substitutions. Alternatively, or additionally, a crystal structure of an antigen-antibody complex to identify contact points between the antibody and antigen. Such contact residues and neighboring residues may be targeted or eliminated as candidates for substitution. Variants may be screened to determine whether they contain the desired properties.

[0230] Amino acid sequence insertions include amino- and/or carboxyl-terminal fusions ranging in length from one residue to polypeptides containing a hundred or more residues, as well as intrasequence insertions of single or multiple amino acid residues. Examples of terminal insertions include an antibody with an N-terminal methionyl residue. Other insertional variants of the antibody molecule include the fusion to the N- or C-terminus of the antibody to an enzyme (e.g. for ADEPT) or a polypeptide which increases the serum half-life of the antibody.

[0231] In certain embodiments, the inventive CD3 binding domains and antibodies comprising them can be altered to increase or decrease the extent to which the antibody is glycosylated. Addition or deletion of glycosylation sites to anti-CD3 antibody of the invention may be conveniently accomplished by altering the amino acid sequence such that one or more glycosylation sites is created or removed.

[0232] Where the antibody comprises an Fc region, the carbohydrate attached thereto may be altered. Antibodies produced by mammalian cells typically comprise a branched, biantennary oligosaccharide that is generally attached by an N-linkage to Asn297 of the CH2 domain of the Fc region. See, e.g., Wright et al. TIBTECH 15:26-32 (1997). The oligosaccharide may include various carbohydrates, e.g., mannose, N-acetyl glucosamine (GlcNAc), galactose, and sialic acid, as well as a fucose attached to a GlcNAc in the “stem” of the biantennary oligosaccharide structure. In some embodiments, modifications of the oligosaccharide in an antibody of the invention may be made in order to create antibody variants with certain improved properties.

[0233] In certain embodiments, variants of the inventive CD3 binding domains and antibodies comprising them are provided having a carbohydrate structure that lacks fucose attached (directly or indirectly) to an Fc region. For example, the amount of fucose in such antibody may be from 1% to 80%, from 1% to 65%, from 5% to 65% or from 20% to 40%. The amount of fucose is determined by calculating the average amount of fucose within the sugar chain at Asn297, relative to the sum of all glycostructures attached to Asn 297 (e.g. complex, hybrid and high mannose structures) as measured by MALDI-TOF mass spectrometry, as described in WO 2008/077546, for example. Asn297 refers to the asparagine residue located at about position 297 in the Fc region (EU numbering of Fc region residues); however, Asn297 may also be located about +3 amino acids upstream or downstream of position 297, i.e., between positions 294 and 300, due to minor sequence variations in antibodies. Such fucosylation variants may have improved ADCC function. See, e.g., US Patent Publication Nos. US 2003/0157108 (Presta, L.); US 2004/0093621 (Kyowa Hakko Kogyo Co., Ltd). Examples of publications related to “defucosylated” or “fucose-deficient” antibody variants include: US 2003/0157108; WO 2000/61739; WO 2001/29246; US 2003/0115614; US 2002/0164328; US 2004/0093621; US 2004/0132140; US 2004/0110704; US 2004/0110282; US 2004/0109865; WO 2003/085119; WO 2003/084570; WO 2005/035586; WO 2005/035778; WO2005/053742; WO2002/031140; Okazaki et al. J. Mol. Biol. 336:1239-1249 (2004); Yamane-Ohnuki et al. Biotech. Bioeng. 87: 614 (2004). Examples of cell lines capable of producing defucosylated antibodies include Lec13 CHO cells deficient in protein fucosylation (Ripka et al. Arch. Biochem. Biophys. 249:533-545 (1986); US Pat Pub No 2003/0157108 A1, Presta, L; and WO 2004/056312 A1, Adams et al., especially at Example 11), and knockout cell lines, such as alpha-1,6-fucosyltransferase gene, FUT8, knockout CHO cells (see, e.g., Yamane-Ohnuki et al. Biotech. Bioeng. 87: 614 (2004); Kanda, Y. et al., Biotechnol. Bioeng., 94(4):680-688 (2006); and WO2003/085107).

[0234] Anti-CD3 antibodies variants are further provided with bisected oligosaccharides, for example, in which a biantennary oligosaccharide attached to the Fc region of the antibody is bisected by GlcNAc. Such antibody variants may have reduced fucosylation and/or improved ADCC function. Examples of such antibody variants are described, e.g., in WO 2003/011878 (Jean-Mairet et al.); U.S. Pat. No. 6,602,684 (Umana et al.); and US 2005/0123546 (Umana et al.). Antibody variants with at least one galactose residue in the oligosaccharide attached to the Fc region are also provided. Such antibody variants may have improved CDC function. Such antibody variants are described, e.g., in WO 1997/30087 (Patel et al.); WO 1998/58964 (Raju, S.); and WO 1999/22764 (Raju, S.).

[0235] In certain embodiments, one or more amino acid modifications may be introduced into the Fc region of an anti-CD3 antibody of the invention, thereby generating an Fc region variant (see e.g., US 2012/0251531). The Fc region variant may comprise a human Fc region sequence (e.g., a human IgG1, IgG2, IgG3 or IgG4 Fc region) comprising an amino acid modification (e.g., a substitution) at one or more amino acid positions.

[0236] In certain embodiments, the invention contemplates an anti-CD3 antibody variant that possesses some but not all effector functions, which make it a desirable candidate for applications in which the half life of the antibody in vivo is important yet certain effector functions (such as complement and ADCC) are unnecessary or deleterious. In vitro and/or in vivo cytotoxicity assays can be conducted to confirm the reduction/depletion of CDC and/or ADCC activities. For example, Fc receptor (FcR) binding assays can be conducted to ensure that the antibody lacks FcyR binding (hence likely lacking ADCC activity) but retains FcRn binding ability. The primary cells for mediating ADCC, NK cells, express FcyRIII only, whereas monocytes express FcyRI, FcyRII and FcyRIII. FcR expression on hematopoietic cells is summarized in Table 3 on page 464 of Ravetch and Kinet, Annu. Rev. Immunol. 9:457-492 (1991). Non-limiting examples of in vitro assays to assess ADCC activity of a molecule of interest is described in U.S. Pat. No. 5,500,362 (see, e.g. Hellstrom, I. et al. Proc. Nat'l Acad. Sci. USA 83:7059-7063 (1986)) and Hellstrom, I et al., Proc. Nat'l Acad. Sci. USA 82:1499-1502 (1985); U.S. Pat. No. 5,821,337 (see Bruggemann, M. et al., J. Exp. Med. 166:1351-1361 (1987)). Alternatively, non-radioactive assays methods may be employed (see, for example, ACTI™ non-radioactive cytotoxicity assay for flow cytometry (Cell Technology, Inc. Mountain View, Calif.; and CytoTox 96® non-radioactive cytotoxicity assay (Promega, Madison, Wis.). Useful effector cells for such assays include peripheral blood mononuclear cells (PBMC) and Natural Killer (NK) cells. Alternatively, or additionally, ADCC activity of the molecule of interest may be assessed in vivo, e.g., in an animal model such as that disclosed in Clynes et al. Proc. Nat'l Acad. Sci. USA 95:652-656 (1998). C1q binding assays may also be carried out to confirm that the antibody is unable to bind C1q and hence lacks CDC activity. See, e.g., C1q and C3c binding ELISA in WO 2006/029879 and WO 2005/100402. To assess complement activation, a CDC assay may be performed (see, for example, Gazzano-Santoro et al. J. ImmunoL Methods 202:163 (1996); Cragg, M. S. et al. Blood. 101:1045-1052 (2003); and Cragg, M. S. and M. J. Glennie Blood. 103:2738-2743 (2004)). FcRn binding and in vivo clearance/half life determinations can also be performed using methods known in the art (see, e.g., Petkova, S. B. et al. Int'l. ImmunoL 18(12):1759-1769 (2006)).

[0237] Antibodies with reduced effector function include those with substitution of one or more of Fc region residues 238, 265, 269, 270, 297, 327 and 329 (U.S. Pat. Nos. 6,737,056 and 8,219,149). Such Fc mutants include Fc mutants with substitutions at two or more of amino acid positions 265, 269, 270, 297 and 327, including the so-called “DANA” Fc mutant with substitution of residues 265 and 297 to alanine (U.S. Pat. Nos. 7,332,581 and 8,219,149).

[0238] In certain embodiments, the proline at position 329 of a wild-type human Fc region in the antibody is substituted with glycine or arginine or an amino acid residue large enough to destroy the proline sandwich within the Fc/Fc gamma receptor interface that is formed between the proline 329 of the Fc and tryptophan residues Trp 87 and Trp 110 of FcgRIII (Sondermann et al.: Nature 406, 267-273 (20 Jul. 2000)). In certain embodiments, the antibody comprises at least one further amino acid substitution. In one embodiment, the further amino acid substitution is S228P, E233P, L234A, L235A, L235E, N297A, N297D, or P331S, and still in another embodiment the at least one further amino acid substitution is L234A and L235A of the human IgG1 Fc region or S228P and L235E of the human IgG4 Fc region (see e.g., US 2012/0251531), and still in another embodiment the at least one further amino acid substitution is L234A and L235A and P329G of the human IgG1 Fc region.

[0239] Certain antibody variants with improved or diminished binding to FcRs are described. (See, e.g., U.S. Pat. No. 6,737,056; WO 2004/056312, and Shields et al., J. Biol. Chem. 9(2): 6591-6604 (2001).)

[0240] In certain embodiments, an antibody variant comprises an Fc region with one or more amino acid substitutions which improve ADCC, e.g., substitutions at positions 298, 333, and/or 334 of the Fc region (EU numbering of residues).

[0241] In some embodiments, alterations are made in the Fc region that result in altered (i.e., either improved or diminished) C1q binding and/or Complement Dependent Cytotoxicity (CDC), e.g., as described in U.S. Pat. No. 6,194,551, WO 99/51642, and Idusogie et al. J. Immunol. 164: 4178-4184 (2000).

[0242] Antibodies with increased half lives and improved binding to the neonatal Fc receptor (FcRn), which is responsible for the transfer of maternal IgGs to the fetus (Guyer et al., J. Immunol. 117:587 (1976) and Kim et al., J. Immunol. 24:249 (1994)), are described in US2005/0014934A1 (Hinton et al.). Those antibodies comprise an Fc region with one or more substitutions therein which improve binding of the Fc region to FcRn. Such Fc variants include those with substitutions at one or more of Fc region residues: 238, 256, 265, 272, 286, 303, 305, 307, 311, 312, 317, 340, 356, 360, 362, 376, 378, 380, 382, 413, 424 or 434, e.g., substitution of Fc region residue 434 (U.S. Pat. No. 7,371,826). See also Duncan & Winter, Nature 322:738-40 (1988); U.S. Pat. Nos. 5,648,260; 5,624,821; and WO 94/29351 concerning other examples of Fc region variants.

[0243] In some embodiments, the anti-CD3 antibody (e.g., bispecific anti-CD3 antibody) comprises an Fc region comprising an N297G mutation.

[0244] In some embodiments, the anti-CD3 antibody comprising the N297G mutation comprises one or more heavy chain constant domains, wherein the one or more heavy chain constant domains are selected from a first CH1 (CH11) domain, a first CH2 (CH21) domain, a first CH3 (CH31) domain, a second CH1 (CH12) domain, second CH2 (CH22) domain, and a second CH3 (CH32) domain. In some instances, at least one of the one or more heavy chain constant domains is paired with another heavy chain constant domain. In some instances, the CH31 and CH32 domains each comprise a protuberance or cavity, and wherein the protuberance or cavity in the CH31 domain is positionable in the cavity or protuberance, respectively, in the CH32 domain. In some instances, the CH31 and CH32 domains meet at an interface between said protuberance and cavity. In some instances, the CH21 and CH22 domains each comprise a protuberance or cavity, and wherein the protuberance or cavity in the CH21 domain is positionable in the cavity or protuberance, respectively, in the CH22 domain. In other instances, the CH21 and CH22 domains meet at an interface between said protuberance and cavity. In some instances, the anti-CD3 antibody is an IgG1 antibody.

[0245] In certain embodiments, it may be desirable to create cysteine engineered antibodies, e.g., “thioMAbs,” in which one or more residues of an antibody are substituted with cysteine residues. In particular embodiments, the substituted residues occur at accessible sites of the antibody. By substituting those residues with cysteine, reactive thiol groups are thereby positioned at accessible sites of the antibody and may be used to conjugate the antibody to other moieties, such as drug moieties or linker-drug moieties, to create an immunoconjugate, as described further herein. In certain embodiments, any one or more of the following residues may be substituted with cysteine: V205 (Kabat numbering) of the light chain; A118 (EU numbering) of the heavy chain; and S400 (EU numbering) of the heavy chain Fc region. Cysteine engineered antibodies may be generated as described, for example, in U.S. Pat. No. 7,521,541.

[0246] In certain embodiments, the inventive CD3 binding domains and antibodies comprising them may be further modified to contain additional nonproteinaceous moieties that are known in the art and readily available. The moieties suitable for derivatization of the antibody include but are not limited to water soluble polymers. Non-limiting examples of water soluble polymers include, but are not limited to, polyethylene glycol (PEG), copolymers of ethylene glycol/propylene glycol, carboxymethylcellulose, dextran, polyvinyl alcohol, polyvinyl pyrrolidone, poly-1,3-dioxolane, poly-1,3,6-trioxane, ethylene/maleic anhydride copolymer, polyaminoacids (either homopolymers or random copolymers), and dextran or poly(n-vinyl pyrrolidone)polyethylene glycol, polypropylene glycol homopolymers, polypropylene oxide/ethylene oxide co-polymers, polyoxyethylated polyols (e.g., glycerol), polyvinyl alcohol, and mixtures thereof. Polyethylene glycol propionaldehyde may have advantages in manufacturing due to its stability in water. The polymer may be of any molecular weight, and may be branched or unbranched. The number of polymers attached to the antibody may vary, and if more than one polymer are attached, they can be the same or different molecules. In general, the number and/or type of polymers used for derivatization can be determined based on considerations including, but not limited to, the particular properties or functions of the antibody to be improved, whether the antibody derivative will be used in a therapy under defined conditions, etc.

[0247] In another embodiment, conjugates of an antibody and nonproteinaceous moiety that may be selectively heated by exposure to radiation are provided. In one embodiment, the nonproteinaceous moiety is a carbon nanotube (Kam et al., Proc. Natl. Acad. Sci. USA 102: 11600-11605 (2005)). The radiation may be of any wavelength, and includes, but is not limited to, wavelengths that do not harm ordinary cells, but which heat the nonproteinaceous moiety to a temperature at which cells proximal to the antibody-nonproteinaceous moiety are killed.

[0248] In certain embodiments, the inventive CD3 binding domains and antibodies comprising them may be produced using recombinant methods and compositions, for example, as described in U.S. Pat. No. 4,816,567. In one embodiment, isolated nucleic acid encoding an anti-CD3 antibody described herein is provided. Such nucleic acid may encode an amino acid sequence comprising the VL and/or an amino acid sequence comprising the VH of the antibody (e.g., the light and/or heavy chains of the antibody). In a further embodiment, one or more vectors (e.g., expression vectors) comprising such nucleic acid are provided. In a further embodiment, a host cell comprising such nucleic acid is provided. In one such embodiment, a host cell comprises (e.g., has been transformed with): (1) a vector comprising a nucleic acid that encodes an amino acid sequence comprising the VL of the antibody and an amino acid sequence comprising the VH of the antibody, or (2) a first vector comprising a nucleic acid that encodes an amino acid sequence comprising the VL of the antibody and a second vector comprising a nucleic acid that encodes an amino acid sequence comprising the VH of the antibody. In one embodiment, the host cell is eukaryotic, e.g. a Chinese Hamster Ovary (CHO) cell or lymphoid cell (e.g., Y0, NS0, Sp20 cell). In one embodiment, a method of making an anti-CD3 antibody is provided, wherein the method comprises culturing a host cell comprising a nucleic acid encoding the antibody, as provided above, under conditions suitable for expression of the antibody, and optionally recovering the antibody from the host cell (or host cell culture medium).

[0249] For recombinant production of an anti-CD3 antibody, nucleic acid encoding an antibody, e.g., as described above, is isolated and inserted into one or more vectors for further cloning and/or expression in a host cell. Such nucleic acid may be readily isolated and sequenced using conventional procedures (e.g., by using oligonucleotide probes that are capable of binding specifically to genes encoding the heavy and light chains of the antibody).

[0250] Suitable host cells for cloning or expression of antibody-encoding vectors include prokaryotic or eukaryotic cells described herein. For example, antibodies may be produced in bacteria, in particular when glycosylation and Fc effector function are not needed. For expression of antibody fragments and polypeptides in bacteria, see, e.g., U.S. Pat. Nos. 5,648,237, 5,789,199, and 5,840,523. (See also Charlton, Methods in Molecular Biology, Vol. 248 (B.K.C. Lo, ed., Humana Press, Totowa, N.J., 2003), pp. 245-254, describing expression of antibody fragments in E. coli.) After expression, the antibody may be isolated from the bacterial cell paste in a soluble fraction and can be further purified.

[0251] In addition to prokaryotes, eukaryotic microbes such as filamentous fungi or yeast are suitable cloning or expression hosts for antibody-encoding vectors, including fungi and yeast strains whose glycosylation pathways have been “humanized,” resulting in the production of an antibody with a partially or fully human glycosylation pattern. See, e.g., Gerngross, Nat. Biotech. 22:1409-1414 (2004), and Li et al., Nat. Biotech. 24:210⁻²¹⁵ (2006); WO 2009/036379; WO 2010/105256; and WO 2012/009568.

[0252] Suitable host cells for the expression of glycosylated antibody are also derived from multicellular organisms (invertebrates and vertebrates). Examples of invertebrate cells include plant and insect cells. Numerous baculoviral strains have been identified which may be used in conjunction with insect cells, particularly for transfection of Spodoptera frugiperda cells.

[0253] Plant cell cultures can also be utilized as hosts. See, e.g., U.S. Pat. Nos. 5,959,177, 6,040,498, 6,420,548, 7,125,978, and 6,417,429 (describing PLANTIBODIES™ technology for producing antibodies in transgenic plants).

[0254] Vertebrate cells may also be used as hosts. For example, mammalian cell lines that are adapted to grow in suspension may be useful. Other examples of useful mammalian host cell lines are monkey kidney CV1 line transformed by SV40 (COS-7); human embryonic kidney line (293 or 293 cells as described, e.g., in Graham et al., J. Gen Virol. 36:59 (1977)); baby hamster kidney cells (BHK); mouse sertoli cells (TM4 cells as described, e.g., in Mather, Biol. Reprod. 23:243-251 (1980)); monkey kidney cells (CV1); African green monkey kidney cells (VERO-76); human cervical carcinoma cells (HELA); canine kidney cells (MDCK; buffalo rat liver cells (BRL 3A); human lung cells (W138); human liver cells (Hep G2); mouse mammary tumor (MMT 060562); TRI cells, as described, e.g., in Mather et al., Annals N.Y. Acad. Sci. 383:44-68 (1982); MRC 5 cells; and FS4 cells. Other useful mammalian host cell lines include Chinese hamster ovary (CHO) cells, including DHFR-CHO cells (Urlaub et al., Proc. Natl. Acad. Sci. USA 77:4216 (1980)); and myeloma cell lines such as Y0, NSO and Sp2/0. For a review of certain mammalian host cell lines suitable for antibody production, see, e.g., Yazaki and Wu, Methods in Molecular Biology, Vol. 248 (B.K.C. Lo, ed., Humana Press, Totowa, N.J.), pp. 255-268 (2003).

[0255] In certain embodiments, the inventive CD3 binding domains and antibodies comprising them may be identified, screened for, selected for or characterized for their physical/chemical properties and/or biological activities by various assays known in the art.

[0256] In one aspect, an anti-CD3 antibody of the invention is tested for its antigen binding activity, for example, by known methods such as ELISA, Western blot, etc.

[0257] In another aspect, competition assays may be used to identify an antibody that competes with an anti-CD3 antibody of the invention for binding to CD3.

[0258] In an exemplary competition assay, immobilized CD3 is incubated in a solution comprising a first labeled antibody that binds to CD3 and a second unlabeled antibody that is being tested for its ability to compete with the first antibody for binding to CD3. The second antibody may be present in a hybridoma supernatant. As a control, immobilized CD3 is incubated in a solution comprising the first labeled antibody but not the second unlabeled antibody. After incubation under conditions permissive for binding of the first antibody to CD3, excess unbound antibody is removed, and the amount of label associated with immobilized CD3 is measured. If the amount of label associated with immobilized CD3 is substantially reduced in the test sample relative to the control sample, then that indicates that the second antibody is competing with the first antibody for binding to CD3. See, e.g., Harlow and Lane (1988) Antibodies: A Laboratory Manual. Ch. 14 (Cold Spring Harbor Laboratory, Cold Spring Harbor, N.Y.).

[0259] In one aspect, assays are provided for identifying anti-CD3 antibodies thereof having biological activity. Biological activity may include, for example, binding to CD3 (e.g., CD3 on the surface of a T cell), or a peptide fragment thereof, either in vivo, in vitro, or ex vivo. In the case of a multispecific (e.g., bispecific) anti-CD3 antibody of the invention (e.g., a T-cell Dependent Bispecific Antibody (TDB) having one anti-CD3 arm and one arm that recognizes a second biological molecule, e.g., a cell surface antigen, e.g., a tumor antigen), biological activity may also include, for example, effector cell activation (e.g., T cell (e.g., CD8+ and/or CD4+ T cell) activation), effector cell population expansion (i.e., an increase in T cell count), target cell population reduction (i.e., a decrease in the population of cells expressing the second biological molecule on their cell surfaces), and/or target cell killing. Antibodies having such biological activity in vivo and/or in vitro are provided. In certain embodiments, an antibody of the invention is tested for such biological activity, as described in detail in the Examples herein below.

[0260] In some embodiments, the activity comprises ability to support B cell killing and/or the activation of the cytotoxic T cells. In certain embodiments, an anti-B cell targeting anti-CD3 antibody of the invention is tested for such B cell killing and/or the activation of the cytotoxic effect of T cells biological activity by any of the methods described herein, in particular the Examples. In some embodiments of any of these activity assays, PBMCs may be isolated from whole blood of healthy donors by Ficoll separation. In particular, human blood may be collected in heparinized syringes, and PBMCs isolated using Leucosep and Ficoll Paque Plus. If needed CD4+T and CD8+ T cells may be separated with Miltenyi kits according to manufacturer's instructions.

[0261] Further, cells may be washed in RPMI medium containing 10% FBS, supplemented with GlutaMax, penicillin & streptomycin, and 0.2 million suspended cells added to a 96-well U-bottom plate. Cells may be cultured in RPMI1640 supplemented with 10% FBS at 37° C. in a humidified standard cell culture incubator. For BJAB cell killing assays, 20,000 BJAB cells may be incubated with effector cells, either as huPBMCs or purified T cells, as indicated ratios per assay, in the presence of various concentrations of TDB antibodies for 24 hours. For endogenous B cell killing assays, 200,000 huPBMCs may be incubated with various concentrations of TDB antibodies for 24 hours.

[0262] After culturing, cells may be washed with FACS buffer (0.5% BSA, 0.05% Na Azide in PBS). Cells may then be stained in FACS buffer, washed with FACS buffer and suspended in FACS buffer containing 1 μg/ml Propidium Iodide. Data may be collected on a FACSCalibur flow cytometer and analyzed using FlowJo. Live B cells may be gated out as PI-CD19+ or PI-CD20+B cells by FACS, and absolute cell count may be obtained with FITC beads added to reaction mix as an internal counting control. The percent (%) of cell killing may be calculated based on non-TDB treated controls. Activated T cells may be detected by CD69 and CD25 surface expression using anti-CD69-FITC and anti-CD25-PE.

[0263] The invention also provides immunoconjugates comprising an inventive CD3 binding domain or an antibody comprising it. An anti-CD3 antibody herein conjugated to one or more cytotoxic agents, such as chemotherapeutic agents or drugs, growth inhibitory agents, toxins (e.g., protein toxins, enzymatically active toxins of bacterial, fungal, plant, or animal origin, or fragments thereof), or radioactive isotopes.

[0264] In some embodiments, an immunoconjugate is an antibody-drug conjugate (ADC) in which an antibody is conjugated to one or more drugs, including but not limited to a maytansinoid (see U.S. Pat. Nos. 5,208,020, 5,416,064 and European Patent EP 0 425 235 B1); an auristatin such as monomethylauristatin drug moieties DE and DF (MMAE and MMAF) (see U.S. Pat. Nos. 5,635,483 and 5,780,588, and 7,498,298); a dolastatin; a calicheamicin or derivative thereof (see U.S. Pat. Nos. 5,712,374, 5,714,586, 5,739,116, 5,767,285, 5,770,701, 5,770,710, 5,773,001, and 5,877,296; Hinman et al., Cancer Res. 53:3336-3342 (1993); and Lode et al., Cancer Res. 58:2925-2928 (1998)); an anthracycline such as daunomycin or doxorubicin (see Kratz et al., Current Med. Chem. 13:477-523 (2006); Jeffrey et al., Bioorganic & Med. Chem. Letters 16:358-362 (2006); Torgov et al., Bioconj. Chem. 16:717-721 (2005); Nagy et al., Proc. Natl. Acad. Sci. USA 97:829-834 (2000); Dubowchik et al., Bioorg. & Med. Chem. Letters 12:1529-1532 (2002); King et al., J. Med. Chem. 45:4336-4343 (2002); and U.S. Pat. No. 6,630,579); methotrexate; vindesine; a taxane such as docetaxel, paclitaxel, larotaxel, tesetaxel, and ortataxel; a trichothecene; and CC1065.

[0265] In some embodiments, an immunoconjugate comprises an anti-CD3 antibody as described herein conjugated to an enzymatically active toxin or fragment thereof, including but not limited to diphtheria A chain, nonbinding active fragments of diphtheria toxin, exotoxin A chain (from Pseudomonas aeruginosa), ricin A chain, abrin A chain, modeccin A chain, alpha-sarcin, Aleurites fordii proteins, dianthin proteins, Phytolaca americana proteins (PAPI, PAPII, and PAP-S), Momordica charantia inhibitor, curcin, crotin, Sapaonaria officinalis inhibitor, gelonin, mitogellin, restrictocin, phenomycin, enomycin, and the tricothecenes.

[0266] In some embodiments, an immunoconjugate comprises an anti-CD3 antibody as described herein conjugated to a radioactive atom to form a radioconjugate. A variety of radioactive isotopes are available for the production of radioconjugates. Examples include At211, 1131, 1125, Y90, Re186, Re188, Sm153, Bi212, P32, Pb212 and radioactive isotopes of Lu. When the radioconjugate is used for detection, it may comprise a radioactive atom for scintigraphic studies, for example tc99m or 1123, or a spin label for nuclear magnetic resonance (NMR) imaging (also known as magnetic resonance imaging, mri), such as iodine-123 again, iodine-131, indium-111, fluorine-19, carbon-13, nitrogen-15, oxygen-17, gadolinium, manganese or iron.

[0267] Conjugates of an antibody and cytotoxic agent may be made using a variety of bifunctional protein coupling agents such as N-succinimidyl-3-(2-pyridyldithio) propionate (SPDP), succinimidyl-4-(N-maleimidomethyl)cyclohexane-1-carboxylate (SMCC), iminothiolane (IT), bifunctional derivatives of imidoesters (such as dimethyl adipimidate HCl), active esters (such as disuccinimidyl suberate), aldehydes (such as glutaraldehyde), bis-azido compounds (such as bis(p-azidobenzoyl)hexanediamine), bis-diazonium derivatives (such as bis-(p-diazoniumbenzoyl)-ethylenediamine), diisocyanates (such as toluene 2,6-diisocyanate), and bis-active fluorine compounds (such as 1,5-difluoro-2,4-dinitrobenzene). For example, a ricin immunotoxin can be prepared as described in Vitetta et al., Science 238:1098 (1987). Carbon-14-labeled 1-isothiocyanatobenzyl-3-methyldiethylene triaminepentaacetic acid (MX-DTPA) is an exemplary chelating agent for conjugation of radionucleotide to the antibody. See WO94/11026. The linker may be a “cleavable linker” facilitating release of a cytotoxic drug in the cell. For example, an acid-labile linker, peptidase-sensitive linker, photolabile linker, dimethyl linker or disulfide-containing linker (Chari et al., Cancer Res. 52:127-131 (1992); U.S. Pat. No. 5,208,020) may be used.

[0268] The immunuoconjugates or ADCs herein expressly contemplate, but are not limited to such conjugates prepared with cross-linker reagents including, but not limited to, BMPS, EMCS, GMBS, HBVS, LC-SMCC, MBS, MPBH, SBAP, SIA, SIAB, SMCC, SMPB, SMPH, sulfo-EMCS, sulfo-GMBS, sulfo-KMUS, sulfo-MBS, sulfo-SIAB, sulfo-SMCC, and sulfo-SMPB, and SVSB (succinimidyl-(4-vinylsulfone)benzoate) which are commercially available (e.g., from Pierce Biotechnology, Inc., Rockford, Ill., U.S.A).

[0269] In certain embodiments, any of the anti-CD3 antibodies of the invention (e.g., bispecific anti-CD3 antibodies of the invention that bind to CD3 and a second biological molecule, e.g., a cell surface antigen, e.g., a tumor antigen, such as TDB antibodies of the invention or variants thereof) is useful for detecting the presence of CD3 in a biological sample. The term “detecting” as used herein encompasses quantitative or qualitative detection. In certain embodiments, a biological sample comprises a cell or tissue.

[0270] In one embodiment, an anti-CD3 antibody for use in a method of diagnosis or detection is provided. In a further aspect, a method of detecting the presence of CD3 in a biological sample is provided. In certain embodiments, the method comprises contacting the biological sample with an anti-CD3 antibody as described herein under conditions permissive for binding of the anti-CD3 antibody to CD3, and detecting whether a complex is formed between the anti-CD3 antibody and CD3. Such method may be an in vitro or in vivo method.

[0271] In certain embodiments, labeled anti-CD3 antibodies are provided. Labels include, but are not limited to, labels or moieties that are detected directly (such as fluorescent, chromophoric, electron-dense, chemiluminescent, and radioactive labels), as well as moieties, such as enzymes or ligands, that are detected indirectly, e.g., through an enzymatic reaction or molecular interaction. Exemplary labels include, but are not limited to, the radioisotopes 32P, 14C, 1251, 3H, and 1311I, fluorophores such as rare earth chelates or fluorescein and its derivatives, rhodamine and its derivatives, dansyl, umbelliferone, luceriferases, e.g., firefly luciferase and bacterial luciferase (U.S. Pat. No. 4,737,456), luciferin, 2,3-dihydrophthalazinediones, horseradish peroxidase (HRP), alkaline phosphatase, 0-galactosidase, glucoamylase, lysozyme, saccharide oxidases, e.g., glucose oxidase, galactose oxidase, and glucose-6-phosphate dehydrogenase, heterocyclic oxidases such as uricase and xanthine oxidase, coupled with an enzyme that employs hydrogen peroxide to oxidize a dye precursor such as HRP, lactoperoxidase, or microperoxidase, biotin/avidin, spin labels, bacteriophage labels, stable free radicals, and the like.

[0272] In certain embodiments, the inventive CD3 binding domains and antibodies comprising may be prepared as pharmaceutical formulations (also known as “pharmaceutical compositions”) by mixing such antibody having the desired degree of purity with one or more optional pharmaceutically acceptable carriers (Remington's Pharmaceutical Sciences 16th edition, Osol, A. Ed. (1980)), in the form of lyophilized formulations or aqueous solutions. Pharmaceutically acceptable carriers are generally nontoxic to recipients at the dosages and concentrations employed, and include, but are not limited to: buffers such as phosphate, citrate, and other organic acids; antioxidants including ascorbic acid and methionine; preservatives (such as octadecyldimethylbenzyl ammonium chloride; hexamethonium chloride; benzalkonium chloride; benzethonium chloride; phenol, butyl or benzyl alcohol; alkyl parabens such as methyl or propyl paraben; catechol; resorcinol; cyclohexanol; 3-pentanol; and m-cresol); low molecular weight (less than about 10 residues) polypeptides; proteins, such as serum albumin, gelatin, or immunoglobulins; hydrophilic polymers such as polyvinylpyrrolidone; amino acids such as glycine, glutamine, asparagine, histidine, arginine, or lysine; monosaccharides, disaccharides, and other carbohydrates including glucose, mannose, or dextrins; chelating agents such as EDTA; sugars such as sucrose, mannitol, trehalose or sorbitol; salt-forming counter-ions such as sodium; metal complexes (e.g. Zn-protein complexes); and/or non-ionic surfactants such as polyethylene glycol (PEG). Exemplary pharmaceutically acceptable carriers herein further include insterstitial drug dispersion agents such as soluble neutral-active hyaluronidase glycoproteins (sHASEGP), for example, human soluble PH-20 hyaluronidase glycoproteins, such as rHuPH20 (HYLENEX®, Baxter International, Inc.). Certain exemplary sHASEGPs and methods of use, including rHuPH20, are described in US Patent Publication Nos. 2005/0260186 and 2006/0104968. In one aspect, a sHASEGP is combined with one or more additional glycosaminoglycanases such as chondroitinases.

[0273] Exemplary lyophilized antibody formulations are described in U.S. Pat. No. 6,267,958. Aqueous antibody formulations include those described in U.S. Pat. No. 6,171,586 and WO2006/044908, the latter formulations including a histidine-acetate buffer.

[0274] The formulation herein may also contain more than one active ingredients as necessary for the particular indication being treated, preferably those with complementary activities that do not adversely affect each other. For example, it may be desirable to further provide an additional therapeutic agent (e.g., a chemotherapeutic agent, a cytotoxic agent, a growth inhibitory agent, and/or an anti-hormonal agent, such as those recited herein above). Such active ingredients are suitably present in combination in amounts that are effective for the purpose intended.

[0275] Active ingredients may be entrapped in microcapsules prepared, for example, by coacervation techniques or by interfacial polymerization, for example, hydroxymethylcellulose or gelatin-microcapsules and poly-(methylmethacylate) microcapsules, respectively, in colloidal drug delivery systems (for example, liposomes, albumin microspheres, microemulsions, nano-particles and nanocapsules) or in macroemulsions. Such techniques are disclosed in Remington's Pharmaceutical Sciences 16th edition, Osol, A. Ed. (1980).

[0276] Sustained-release preparations may be prepared. Suitable examples of sustained-release preparations include semipermeable matrices of solid hydrophobic polymers containing the antibody, which matrices are in the form of shaped articles, for example, films, or microcapsules.

[0277] The formulations to be used for in vivo administration are generally sterile. Sterility may be readily accomplished, e.g., by filtration through sterile filtration membranes.

[0278] In certain embodiments, the inventive CD3 binding domains and antibodies comprising are used in therapeutic methods.

[0279] In one aspect, an anti-CD3 antibody for use as a medicament is provided. In further aspects, an anti-CD3 antibody for use in treating or delaying progression of a cell proliferative disorder (e.g., cancer) or an autoimmune disorder (e.g., arthritis, rheumatoid arthritis, colitis, inflammatory bowel disease, autoimmune type I diabetes, etc.) is provided. In certain embodiments, an anti-CD3 antibody for use in a method of treatment is provided. In certain embodiments, the invention provides an anti-CD3 antibody for use in a method of treating an individual having a cell proliferative disorder or an autoimmune disorder comprising administering to the individual an effective amount of the anti-CD3 antibody. In one such embodiment, the method further comprises administering to the individual an effective amount of at least one additional therapeutic agent, for example, as described below. In further embodiments, the invention provides an anti-CD3 antibody for use in enhancing immune function in an individual having a cell proliferative disorder or an autoimmune disorder. In certain embodiments, the invention provides an anti-CD3 antibody for use in a method of enhancing immune function in an individual having a cell proliferative disorder or an autoimmune disorder comprising administering to the individual an effective of the anti-CD3 antibody to activate effector cells (e.g., T cells, e.g., CD8+ and/or CD4+ T cells including Tregs), expand (increase) an effector cell population, reduce a target cell (e.g., a cell expressing a second biological molecule recognized by an anti-CD3 antibody of the invention, such as a bispecific TDB antibody of the invention) population, and/or kill a target cell (e.g., target tumor cell). An “individual” according to any of the above embodiments may be a human.

[0280] In a further aspect, the invention provides for the use of an anti-CD3 antibody in the manufacture or preparation of a medicament. In one embodiment, the medicament is for treatment of a cell proliferative disorder (e.g., cancer) or an autoimmune disorder (e.g., arthritis, rheumatoid arthritis, colitis, inflammatory bowel disease, autoimmune type I diabetes, etc.). In a further embodiment, the medicament is for use in a method of treating a cell proliferative disorder or an autoimmune disorder comprising administering to an individual having a cell proliferative disorder or an autoimmune disorder an effective amount of the medicament. In one such embodiment, the method further comprises administering to the individual an effective amount of at least one additional therapeutic agent, for example, as described below. In a further embodiment, the medicament is for activating effector cells (e.g., T cells, e.g., CD8+ and/or CD4+ T cells including Tregs), expanding (increasing) an effector cell population, reducing a target cell (e.g., a cell expressing a second biological molecule recognized by an anti-CD3 antibody of the invention, such as a bispecific TDB antibody of the invention) population, and/or killing target cells (e.g., target tumor cells) in the individual. In a further embodiment, the medicament is for use in a method of enhancing immune function in an individual having a cell proliferative disorder or an autoimmune disorder comprising administering to the individual an amount effective of the medicament to activate effector cells (e.g., T cells, e.g., CD8+ and/or CD4+ T cells), expand (increase) an effector cell population, reduce a target cell (e.g., a cell expressing a second biological molecule recognized by an anti-CD3 antibody of the invention, such as a bispecific TDB antibody of the invention) population, and/or kill a target cell (e.g., target tumor cell). An “individual” according to any of the above embodiments may be a mammal and, in particular, a human.

[0281] In a further aspect, the invention provides a method for treating a disorder comprising a proliferative disorder, an oncological disorder, an immune-oncological disorder, a neurological disorder, a cognitive disorder, a neurodegenerative disorder, an autoimmune disorder. In one embodiment, the method comprises administering to an individual having such disorder an effective amount of an anti-CD3 antibody. In one such embodiment, the method further comprises administering to the individual an effective amount of at least one additional therapeutic agent, for example, as described below. An “individual” according to any of the above embodiments may be a mammal and, in particular, a human.

[0282] In a further aspect, the invention provides a method for enhancing immune function in an individual having a disorder in an individual having such disorder. In one embodiment, the method comprises administering to the individual an effective amount of an anti-CD3 antibody to activate effector cells (e.g., T cells, e.g., CD8+ and/or CD4+ T cells), expand (increase) an effector cell population, reduce a target cell population, and/or kill a target cell (e.g., target tumor cell). In one embodiment, an “individual” is a mammal and, in particular, a human.

[0283] In a further aspect, the invention provides a method for treating a hematological cancer, such as a B cell cancer (for example, mature B-cell lymphoma) by administering an effective amount of an anti-CD3 antibody of the invention, such as a bispecific TDB antibody of the invention, such as an anti-B cell targeting TDB, such as a CD20-TDB having an anti-CD3 arm and an anti-CD20 arm. In a further aspect of the embodiment, the mature B-cell lymphoma is a Non-Hodgkin's Lymphoma (NHL). In a further aspect of the embodiment, the NHL is selected from the group comprising: germinal-center B-cell-like (GCB) DLBCL, activated B-cell-like (ABC) DLBCL, follicular lymphoma (FL), mantle cell lymphoma (MCL), acute myeloid leukemia (AML), chronic lymphoid leukemia (CLL), marginal zone lymphoma (MZL), small lymphocytic leukemia (SLL), lymphoplasmacytic lymphoma (LL), Waldenstrom macroglobulinemia (WM), central nervous system lymphoma (CNSL), Burkitt's lymphoma (BL), B-cell prolymphocytic leukemia, Splenic marginal zone lymphoma, Hairy cell leukemia, Splenic lymphoma/leukemia, unclassifiable, Splenic diffuse red pulp small B-cell lymphoma, Hairy cell leukemia variant, Waldenstrom macroglobulinemia, Heavy chain diseases, a Heavy chain disease, γ Heavy chain disease, Heavy chain disease, Plasma cell myeloma, Solitary plasmacytoma of bone, Extraosseous plasmacytoma, Extranodal marginal zone lymphoma of mucosa-associated lymphoid tissue (MALT lymphoma), Nodal marginal zone lymphoma, Pediatric nodal marginal zone lymphoma, Pediatric follicular lymphoma, Primary cutaneous follicle centre lymphoma, T-cell/histiocyte rich large B-cell lymphoma, Primary DLBCL of the CNS, Primary cutaneous DLBCL, leg type, EBV-positive DLBCL of the elderly, DLBCL associated with chronic inflammation, Lymphomatoid granulomatosis, Primary mediastinal (thymic) large B-cell lymphoma, Intravascular large B-cell lymphoma, ALK-positive large B-cell lymphoma, Plasmablastic lymphoma, Large B-cell lymphoma arising in HHV8-associated multicentric Castleman disease, Primary effusion lymphoma: B-cell lymphoma, unclassifiable, with features intermediate between diffuse large B-cell lymphoma and Burkitt lymphoma, and B-cell lymphoma, unclassifiable, with features intermediate between diffuse large B-cell lymphoma and classical Hodgkin lymphoma. In a preferred embodiment of the invention, the method comprises treating a cancer comprising germinal-center B-cell-like (GCB) DLBCL, activated B-cell-like (ABC) DLBCL, follicular lymphoma (FL), mantle cell lymphoma (MCL), acute myeloid leukemia (AML), chronic lymphoid leukemia (CLL), marginal zone lymphoma (MZL), small lymphocytic leukemia (SLL), lymphoplasmacytic lymphoma (LL), Waldenstrom macroglobulinemia (WM), central nervous system lymphoma (CNSL), or Burkitt's lymphoma (BL).

[0284] In one embodiment, the method comprises administering to an individual having such a hematological cancer (for example, B cell cancer, for example, B cell lymphoma) an effective amount of an anti-CD3 antibody of the invention, such as a bispecific TDB antibody, such as a CD20 TDB comprising an anti-CD20 targeting arm and an anti-CD3 targeting arm. In other embodiments, a CD20 TDB is co-administered with one or more additional therapeutic agents. In one embodiment, the therapeutic agent is an antibody targeting CD20. In one embodiment, a CD20 TDB is co-administered with one or more antibodies targeting CD20 selected from the chimeric monoclonal CD20 antibody, rituximab (Rituxan®) or the monoclonal CD20 antibody, obinutuzumab (Gazyva®). In one embodiment, a CD20 TDB is co-administered with rituximab. In one embodiment, a CD20 TDB is co-administered with obinutuzumab. In one embodiment, a CD20 TDB is co-administered with obinutuzumab and rituximab.

[0285] In one further embodiment, the anti-CD3 antibody of the invention (for example, the CD20 TDB), with or without a CD20 monoclonal antibody, is administered with a further chemotherapy agent and/or an antibody-drug conjugate (ADC). In one embodiment, a CD20 TDB is co-administered with one or more additional chemotherapy agents selected from cyclophosphamide, doxorubicin, vincristine, and prednisolone (CHOP). In one embodiment, a CD20 TDB is co-administered with an ADC. In one embodiment, a CD20 TDB is co-administered with CHOP, wherein vincristine is replaced with an ADC. In one embodiment, a CD20 TDB is co-administered with an ADC selected from an anti-CD79b antibody drug conjugate (such as anti-CD79b-MC-vc-PAB-MMAE or the anti-CD79b antibody drug conjugate described in any one of U.S. Pat. No. 8,088,378 and/or US 2014/0030280, or polatuzumab vedotin), an anti-CD19 antibody drug conjugate, an anti-CD22 antibody drug conjugate, an anti-CD45 antibody drug conjugate, and an anti-CD32 drug conjugate.

[0286] In one other embodiment the therapeutic agent is a biological modifier. In one embodiment, a CD20 TDB is co-administered with one or more biological modifiers selected from a BCL-2 inhibitor (such as GDC-0199/ABT-199), lenalidomide (Revlimid®), a PI3K-delta inhibitor (such as idelalisib (Zydelig®)), a PD-1 axis binding antagonist, an agonist, e.g., agonist antibody, directed against an activating co-stimulatory molecule, e.g., CD40, CD226, CD28, OX40 (e.g., AgonOX), GITR, CD137 (also known as TNFRSF9, 4-1 BB, or ILA), CD27 (e.g., CDX-1127), HVEM, or CD127, an antagonist, e.g., antagonist antibody, directed against an inhibitory co-stimulatory molecule, e.g., CTLA-4 (also known as CD152), PD-1, TIM-3, BTLA, VISTA, LAG-3, B7-H3, B7-H4, IDO (e.g., 1-methyl-D-tryptophan (also known as 1-D-MT)), TIGIT, MICA/B, GITR (e.g., TRX518) or arginase, ipilimumab (also known as MDX-010, MDX-101, or Yervoy®), tremelimumab (also known as ticilimumab or CP-675,206, urelumab (also known as BMS-663513), MGA271, an antagonist directed against a TGF beta, e.g., metelimumab (also known as CAT-192), fresolimumab (also known as GC1008), LY2157299k, and an adoptive transfer of a T cell (e.g., a cytotoxic T cell or CTL) expressing a chimeric antigen receptor (CAR), e.g., adoptive transfer of a T cell comprising a dominant-negative TGF beta receptor, e.g, a dominant-negative TGF beta type II receptor.

[0287] In one embodiment, a CD20 TDB is co-administered with rituximab and one or more chemotherapy agents. In one such embodiment, a CD20 TDB is co-administered with rituximab and CHOP. In one embodiment, a CD20 TDB is co-administered with rituximab and an ADC. In one embodiment, a CD20 TDB is co-administered with rituximab and CHOP, wherein vincristine is replaced with an ADC. In one embodiment, a CD20 TDB is co-administered with an ADC selected from an anti-CD79b antibody drug conjugate (such as anti-CD79b-MC-vc-PAB-MMAE or the anti-CD79b antibody drug conjugate described in any one of U.S. Pat. No. 8,088,378 and/or US 2014/0030280, or polatuzumab vedotin), an anti-CD19 antibody drug conjugate, an anti-CD22 antibody drug conjugate, an anti-CD45 antibody drug conjugate, and an anti-CD32 drug conjugate. In one embodiment, a CD20 TDB is co-administered with rituximab and one or more biological modifiers selected from a BCL-2 inhibitor (such as GDC-0199/ABT-199), lenalidomide (Revlimid®), a PI3K-delta inhibitor (such as idelalisib (Zydelig®)), a PD-1 axis binding antagonist, an agonist, e.g., agonist antibody, directed against an activating co-stimulatory molecule, e.g., CD40, CD226, CD28, OX40 (e.g., AgonOX), GITR, CD137 (also known as TNFRSF9, 4-1 BB, or ILA), CD27 (e.g., CDX-1127), HVEM, or CD127, an antagonist, e.g., antagonist antibody, directed against an inhibitory co-stimulatory molecule, e.g., CTLA-4 (also known as CD152), PD-1, TIM-3, BTLA, VISTA, LAG-3, B7-H3, B7-H4, IDO (e.g., 1-methyl-D-tryptophan (also known as 1-D-MT)), TIGIT, MICA/B, GITR (e.g., TRX518) or arginase, ipilimumab (also known as MDX-010, MDX-101, or Yervoy®), tremelimumab (also known as ticilimumab or CP-675,206, urelumab (also known as BMS-663513), MGA271, an antagonist directed against a TGF beta, e.g., metelimumab (also known as CAT-192), fresolimumab (also known as GC1008), LY2157299k, and an adoptive transfer of a T cell (e.g., a cytotoxic T cell or CTL) expressing a chimeric antigen receptor (CAR), e.g., adoptive transfer of a T cell comprising a dominant-negative TGF beta receptor, e.g, a dominant-negative TGF beta type II receptor.

[0288] In one embodiment, a CD20 TDB is co-administered with rituximab, one or more chemotherapy agents, and one or more biological modifiers selected from a BCL-2 inhibitor (such as GDC-0199/ABT-199), lenalidomide (Revlimid®), a PI3K-delta inhibitor (such as idelalisib (Zydelig®)), a PD-1 axis binding antagonist, an agonist, e.g., agonist antibody, directed against an activating co-stimulatory molecule, e.g., CD40, CD226, CD28, OX40 (e.g., AgonOX), GITR, CD137 (also known as TNFRSF9, 4-1 BB, or ILA), CD27 (e.g., CDX-1127), HVEM, or CD127, an antagonist, e.g., antagonist antibody, directed against an inhibitory co-stimulatory molecule, e.g., CTLA-4 (also known as CD152), PD-1, TIM-3, BTLA, VISTA, LAG-3, B7-H3, B7-H4, IDO (e.g., 1-methyl-D-tryptophan (also known as 1-D-MT)), TIGIT, MICA/B, GITR (e.g., TRX518) or arginase, ipilimumab (also known as MDX-010, MDX-101, or Yervoy®), tremelimumab (also known as ticilimumab or CP-675,206, urelumab (also known as BMS-663513), MGA271, an antagonist directed against a TGF beta, e.g., metelimumab (also known as CAT-192), fresolimumab (also known as GC1008), LY2157299k, and an adoptive transfer of a T cell (e.g., a cytotoxic T cell or CTL) expressing a chimeric antigen receptor (CAR), e.g., adoptive transfer of a T cell comprising a dominant-negative TGF beta receptor, e.g, a dominant-negative TGF beta type II receptor.

[0289] In one embodiment, a CD20 TDB is co-administered with rituximab, an ADC, and one or more biological modifiers selected from a BCL-2 inhibitor (such as GDC-0199/ABT-199), lenalidomide (Revlimid®), a PI3K-delta inhibitor (such as idelalisib (Zydelig®)), a PD-1 axis binding antagonist, an agonist, e.g., agonist antibody, directed against an activating co-stimulatory molecule, e.g., CD40, CD226, CD28, OX40 (e.g., AgonOX), GITR, CD137 (also known as TNFRSF9, 4-1 BB, or ILA), CD27 (e.g., CDX-1127), HVEM, or CD127, an antagonist, e.g., antagonist antibody, directed against an inhibitory co-stimulatory molecule, e.g., CTLA-4 (also known as CD152), PD-1, TIM-3, BTLA, VISTA, LAG-3, B7-H3, B7-H4, IDO (e.g., 1-methyl-D-tryptophan (also known as 1-D-MT)), TIGIT, MICA/B, GITR (e.g., TRX518) or arginase, ipilimumab (also known as MDX-010, MDX-101, or Yervoy®), tremelimumab (also known as ticilimumab or CP-675,206, urelumab (also known as BMS-663513), MGA271, an antagonist directed against a TGF beta, e.g., metelimumab (also known as CAT-192), fresolimumab (also known as GC1008), LY2157299k, and an adoptive transfer of a T cell (e.g., a cytotoxic T cell or CTL) expressing a chimeric antigen receptor (CAR), e.g., adoptive transfer of a T cell comprising a dominant-negative TGF beta receptor, e.g, a dominant-negative TGF beta type II receptor.

[0290] In one embodiment, a CD20 TDB is co-administered with obinutuzumab and one or more chemotherapy agents. In one embodiment, a CD20 TDB is co-administered with obinutuzumab and CHOP. In one embodiment, a CD20 TDB is co-administered with obinutuzumab and an ADC. In one embodiment, a CD20 TDB is co-administered with obinutuzumab and CHOP, wherein vincristine is replaced with an ADC. In one embodiment, a CD20 TDB is co-administered with an ADC selected from an anti-CD79b antibody drug conjugate (such as anti-CD79b-MC-vc-PAB-MMAE or the anti-CD79b antibody drug conjugate described in any one of U.S. Pat. No. 8,088,378 and/or US 2014/0030280, or polatuzumab vedotin), an anti-CD19 antibody drug conjugate, an anti-CD22 antibody drug conjugate, an anti-CD45 antibody drug conjugate, and an anti-CD32 drug conjugate. In one embodiment, a CD20 TDB is co-administered with obinutuzumab and one or more biological modifiers selected from a BCL-2 inhibitor (such as GDC-0199/ABT-199), lenalidomide (Revlimid®), a PI3K-delta inhibitor (such as idelalisib (Zydelig®)), a PD-1 axis binding antagonist, an agonist, e.g., agonist antibody, directed against an activating co-stimulatory molecule, e.g., CD40, CD226, CD28, OX40 (e.g., AgonOX), GITR, CD137 (also known as TNFRSF9, 4-1 BB, or ILA), CD27 (e.g., CDX-1127), HVEM, or CD127, an antagonist, e.g., antagonist antibody, directed against an inhibitory co-stimulatory molecule, e.g., CTLA-4 (also known as CD152), PD-1, TIM-3, BTLA, VISTA, LAG-3, B7-H3, B7-H4, IDO (e.g., 1-methyl-D-tryptophan (also known as 1-D-MT)), TIGIT, MICA/B, GITR (e.g., TRX518) or arginase, ipilimumab (also known as MDX-010, MDX-101, or Yervoy®), tremelimumab (also known as ticilimumab or CP-675,206, urelumab (also known as BMS-663513), MGA271, an antagonist directed against a TGF beta, e.g., metelimumab (also known as CAT-192), fresolimumab (also known as GC1008), LY2157299k, and an adoptive transfer of a T cell (e.g., a cytotoxic T cell or CTL) expressing a chimeric antigen receptor (CAR), e.g., adoptive transfer of a T cell comprising a dominant-negative TGF beta receptor, e.g, a dominant-negative TGF beta type II receptor.

[0291] In one embodiment, a CD20 TDB is co-administered with obinutuzumab, an ADC, and one or more biological modifiers selected from a BCL-2 inhibitor (such as GDC-0199/ABT-199), lenalidomide (Revlimid®), a PI3K-delta inhibitor (such as idelalisib (Zydelig®)), a PD-1 axis binding antagonist, an agonist, e.g., agonist antibody, directed against an activating co-stimulatory molecule, e.g., CD40, CD226, CD28, OX40 (e.g., AgonOX), GITR, CD137 (also known as TNFRSF9, 4-1 BB, or ILA), CD27 (e.g., CDX-1127), HVEM, or CD127, an antagonist, e.g., antagonist antibody, directed against an inhibitory co-stimulatory molecule, e.g., CTLA-4 (also known as CD152), PD-1, TIM-3, BTLA, VISTA, LAG-3, B7-H3, B7-H4, IDO (e.g., 1-methyl-D-tryptophan (also known as 1-D-MT)), TIGIT, MICA/B, GITR (e.g., TRX518) or arginase, ipilimumab (also known as MDX-010, MDX-101, or Yervoy®), tremelimumab (also known as ticilimumab or CP-675,206, urelumab (also known as BMS-663513), MGA271, an antagonist directed against a TGF beta, e.g., metelimumab (also known as CAT-192), fresolimumab (also known as GC 1008), LY2157299k, and an adoptive transfer of a T cell (e.g., a cytotoxic T cell or CTL) expressing a chimeric antigen receptor (CAR), e.g., adoptive transfer of a T cell comprising a dominant-negative TGF beta receptor, e.g, a dominant-negative TGF beta type II receptor.

[0292] In a further aspect of the invention, the additional therapy comprises an anti-CD20 antibody. In one embodiment, the anti-CD20 antibody is rituximab. In one embodiment, the anti-CD20 antibody is a humanized B-Lyl antibody. In one embodiment, the humanized B-Lyl antibody is obinituzumab. In one embodiment, the anti-CD20 antibody is ofatumumab, ublituximab, and/or ibritumomab tiuxetan.

[0293] In a further aspect of the invention, the additional therapy comprises an alkylating agent. In one embodiment, the alkylating agent is 4-[5-[Bis(2-chloroethyl)amino]-1-methylbenzimidazol-2-yl]butanoic acid and salts thereof. In one embodiment, the alkylating agent is bendamustine.

[0294] In a further aspect of the invention, the additional therapy comprises a BCL-2 inhibitor. In one embodiment, the BCL-2 inhibitor is 4-(4-{[2-(4-chlorophenyl)-4,4-dimethylcyclohex-1-en-1-yl]methyl}piperazin-1-yl)-N-({3-nitro-4-[(tetrahydro-2H-pyran-4-ylmethyl)amino]phenyl}sulfonyl)-2-(1H-pyrrolo[2,3-b]pyridin-5-yloxy)benzamide and salts thereof. In one embodiment, the BCL-2 inhibitor is venetoclax (CAS #: 1257044-40-8).

[0295] In a further aspect of the invention, the additional therapy comprises a phosphoinositide 3-kinase (PI3K) inhibitor. In one embodiment, the PI3K inhibitor inhibits delta isoform PI3K (i.e., P1106). In some embodiments, the PI3K inhibitor is 5-Fluoro-3-phenyl-2-[(1S)-1-(7H-purin-6-ylamino)propyl]-4(3H)-quinazolinone and salts thereof. In some embodiments, the PI3K inhibitor is idelalisib (CAS #: 870281-82-6). In one embodiment, the PI3K inhibitor inhibits alpha and delta isoforms of PI3K. In some embodiments, the PI3K inhibitor is 2-{3-[2-(1-Isopropyl-3-methyl-1H-1,2-4-triazol-5-yl)-5,6-dihydrobenzo[f]imidazo[1,2-d][1,4]oxazepin-9-yl]-1H-pyrazol-1-yl}-2-methylpropanamide and salts thereof.

[0296] In a further aspect of the invention, the additional therapy comprises a Bruton's tyrosine kinase (BTK) inhibitor. In one embodiment, the BTK inhibitor is 1-[(3R)-3-[4-Amino-3-(4-phenoxyphenyl)-1H-pyrazolo[3,4-d]pyrimidin-1-yl]piperidin-1-yl]prop-2-en-1-one and salts thereof. In one embodiment, the BTK inhibitor is ibrutinib (CAS #: 936563-96-1).

[0297] In a further aspect of the invention, the additional therapy comprises thalidomide or a derivative thereof. In one embodiment, the thalidomide or a derivative thereof is (RS)-3-(4-Amino-1-oxo 1,3-dihydro-2H-isoindol-2-yl)piperidine-2,6-dione and salts thereof. In one embodiment, the thalidomide or a derivative thereof is lendalidomide (CAS #: 191732-72-6).

[0298] In a further aspect of the invention, the additional therapy comprises one or more of cyclophosphamide, doxorubicin, vincristine, or prednisolone (CHOP). In one embodiment, the additional therapy further comprises an anti-CD20 antibody as described above (e.g., GA-101 and/or Rituxan®). Any of the above methods and therapies may be used, without limitation, for any cancer, including, for example, treatment of a B-cell cancer or breast cancer.

[0299] In a further aspect, the invention provides a method for treating HER2-positive cancers. In one embodiment, the method comprises administering to an individual having such a cancer an effective amount of an anti-HER2 antibody of the invention, such as a bispecific TDB antibody wih an anti-HER2 targeting arm and an anti-CD3 targeting arm. In a preferred embodiment, the HER2-TDB possesses an acceptable toxicity profile when administered in an effective dose in a patient. In one embodiment, the CD3 arm of the HER2-TDB with an acceptable toxicity profile is a low affinity CD3 arm. In one embodiment, the CD3 arm of the HER2-TDB with an acceptable toxicity profile is 40G5c.

[0300] In a preferable embodiment, the HER2-positive cancer is a HER2-positive breast cancer or HER2-positive gastric cancer. In one embodiment, a HER2 TDB is co-administered with one or more additional therapeutic agents that target the HER pathway. In one embodiment, the therapeutic agent that targets the HER pathway is selected from an EGFR inhibitor, a HER2 inhibitor, a HER3 inhibitor, and/or a HER4 inhibitor. In one embodiment, a HER2 TDB is co-administered with one or more additional therapeutic agents selected from trastuzumab (Herceptin®), T-DM1 (Kadcyla®) and pertuzumab (Perjeta®). In one embodiment, a HER2 TDB is co-administered with trastuzumab. In one embodiment, a HER2 TDB is co-administered with T-DM1. In one embodiment, a HER2 TDB is co-administered with pertuzumab. In one embodiment, a HER2 TDB is co-administered with trastuzumab and pertuzumab. In one embodiment, a HER2 TDB is co-administered with T-DM1 and pertuzumab.

[0301] In a further aspect, the invention provides pharmaceutical formulations comprising any of the anti-CD3 antibodies provided herein, e.g., for use in any of the above therapeutic methods. In one embodiment, a pharmaceutical formulation comprises any of the anti-CD3 antibodies provided herein and a pharmaceutically acceptable carrier. In another embodiment, a pharmaceutical formulation comprises any of the anti-CD3 antibodies provided herein and at least one additional therapeutic agent, for example, as described herein.

[0302] Antibodies of the invention can be used either alone or in combination with other agents in a therapy. For instance, an antibody of the invention may be co-administered with at least one additional therapeutic agent. In certain embodiments, an additional therapeutic agent is a chemotherapeutic agent, growth inhibitory agent, cytotoxic agent, agent used in radiation therapy, anti-angiogenesis agent, apoptotic agent, anti-tubulin agent, or other agent, such as a epidermal growth factor receptor (EGFR) antagonist (e.g., a tyrosine kinase inhibitor), HER1/EGFR inhibitor (e.g., erlotinib (Tarceva™)), platelet derived growth factor inhibitor (e.g., Gleevec™ (Imatinib Mesylate)), a COX-2 inhibitor (e.g., celecoxib), interferon, cytokine, antibody other than the anti-CD3 antibody of the invention, such as an antibody that bind to one or more of the following targets ErbB2, ErbB3, ErbB4, PDGFR-beta, BIyS, APRIL, BCMA VEGF, or VEGF receptor(s), TRAIL/Apo2, PD-1, PD-L1, PD-L2, or another bioactive or organic chemical agent.

[0303] In some embodiments, the invention provides a method wherein the additional therapeutic agent is a glucocorticoid. In one embodiment, the glucocorticoid is dexamethasone.

[0304] Such combination therapies noted above encompass combined administration (where two or more therapeutic agents are included in the same or separate formulations), and separate administration, in which case, administration of the antibody of the invention can occur prior to, simultaneously, and/or following, administration of the additional therapeutic agent or agents. In one embodiment, administration of the anti-CD3 antibody and administration of an additional therapeutic agent occur within about one month, or within about one, two or three weeks, or within about one, two, three, four, five, or six days, of each other. Anti-CD3 antibodies of the invention (e.g., bispecific anti-CD3 antibodies of the invention that bind to CD3 and a second biological molecule, e.g., a cell surface antigen, e.g., a tumor antigen, such as a TDB antibody of the invention or variant thereof) can also be used in combination with radiation therapy.

[0305] An antibody of the invention (and/or any additional therapeutic agent) can be administered by any suitable means, including parenteral, intrapulmonary, and intranasal, and, if desired for local treatment, intralesional administration. Parenteral infusions include intramuscular, intravenous, intraarterial, intraperitoneal, or subcutaneous administration. In some embodiments, the antibody is administered by subcutaneous administration. In some embodiments, an anti-CD3 antibody administered by subcutaneous injection exhibits a less toxic response in a patient than the same anti-CD3 antibody administered by intravenous injection. Dosing can be by any suitable route, for example, by injections, such as intravenous or subcutaneous injections, depending in part on whether the administration is brief or chronic. Various dosing schedules including but not limited to single or multiple administrations over various time-points, bolus administration, and pulse infusion are contemplated herein.

[0306] Antibodies of the invention would be formulated, dosed, and administered in a fashion consistent with good medical practice. Factors for consideration in this context include the particular disorder being treated, the particular mammal being treated, the clinical condition of the individual patient, the cause of the disorder, the site of delivery of the agent, the method of administration, the scheduling of administration, and other factors known to medical practitioners. The antibody need not be, but is optionally formulated with one or more agents currently used to prevent or treat the disorder in question. The effective amount of such other agents depends on the amount of antibody present in the formulation, the type of disorder or treatment, and other factors discussed above. These are generally used in the same dosages and with administration routes as described herein, or about from 1 to 99% of the dosages described herein, or in any dosage and by any route that is empirically/clinically determined to be appropriate.

[0307] For the prevention or treatment of disease, the appropriate dosage of an antibody of the invention (when used alone or in combination with one or more other additional therapeutic agents) will depend on the type of disease to be treated, the type of antibody, the severity and course of the disease, whether the antibody is administered for preventive or therapeutic purposes, previous therapy, the patient's clinical history and response to the antibody, and the discretion of the attending physician. The antibody is suitably administered to the patient at one time or over a series of treatments.

[0308] As a general proposition, the therapeutically effective amount of the anti-CD3 antibody administered to human will be in the range of about 0.01 to about 100 mg/kg of patient body weight whether by one or more administrations. In some embodiments, the antibody used is about 0.01 to about 45 mg/kg, about 0.01 to about 40 mg/kg, about 0.01 to about 35 mg/kg, about 0.01 to about 30 mg/kg, about 0.01 to about 25 mg/kg, about 0.01 to about 20 mg/kg, about 0.01 to about 15 mg/kg, about 0.01 to about 10 mg/kg, about 0.01 to about 5 mg/kg, or about 0.01 to about 1 mg/kg administered daily, for example. In one embodiment, an anti-CD3 antibody described herein is administered to a human at a dose of about 100 mg, about 200 mg, about 300 mg, about 400 mg, about 500 mg, about 600 mg, about 700 mg, about 800 mg, about 900 mg, about 1000 mg, about 1100 mg, about 1200 mg, about 1300 mg or about 1400 mg on day 1 of 21-day cycles. The dose may be administered as a single dose or as multiple doses (e.g., 2 or 3 doses), such as infusions. For repeated administrations over several days or longer, depending on the condition, the treatment would generally be sustained until a desired suppression of disease symptoms occurs. One exemplary dosage of the antibody would be in the range from about 0.05 mg/kg to about 10 mg/kg. Thus, one or more doses of about 0.5 mg/kg, 2.0 mg/kg, 4.0 mg/kg, or 10 mg/kg (or any combination thereof) may be administered to the patient. Such doses may be administered intermittently, for example, every week or every three weeks (e.g., such that the patient receives from about two to about twenty, or, for example, about six doses of the anti-CD3 antibody). An initial higher loading dose, followed by one or more lower doses may be administered. The progress of this therapy is easily monitored by conventional techniques and assays.

[0309] In some embodiments, the methods may further comprise an additional therapy. The additional therapy may be radiation therapy, surgery, chemotherapy, gene therapy, DNA therapy, viral therapy, RNA therapy, immunotherapy, bone marrow transplantation, nanotherapy, monoclonal antibody therapy, or a combination of the foregoing. The additional therapy may be in the form of adjuvant or neoadjuvant therapy. In some embodiments, the additional therapy is the administration of small molecule enzymatic inhibitor or anti-metastatic agent. In some embodiments, the additional therapy is the administration of side-effect limiting agents (e.g., agents intended to lessen the occurrence and/or severity of side effects of treatment, such as anti-nausea agents, etc.). In some embodiments, the additional therapy is radiation therapy. In some embodiments, the additional therapy is surgery. In some embodiments, the additional therapy is a combination of radiation therapy and surgery. In some embodiments, the additional therapy is gamma irradiation. In some embodiments, the additional therapy may be a separate administration of one or more of the therapeutic agents described above.

[0310] In another aspect of the invention, an article of manufacture containing materials useful for the treatment, prevention and/or diagnosis of the disorders described above is provided. The article of manufacture comprises a container and a label or package insert on or associated with the container. Suitable containers include, for example, bottles, vials, syringes, IV solution bags, etc. The containers may be formed from a variety of materials such as glass or plastic. The container holds a composition which is by itself or combined with another composition effective for treating, preventing and/or diagnosing the condition and may have a sterile access port (for example the container may be an intravenous solution bag or a vial having a stopper pierceable by a hypodermic injection needle). At least one active agent in the composition is an antibody of the invention. The label or package insert indicates that the composition is used for treating the condition of choice. Moreover, the article of manufacture may comprise (a) a first container with a composition contained therein, wherein the composition comprises an antibody of the invention; and (b) a second container with a composition contained therein, wherein the composition comprises a further cytotoxic or otherwise therapeutic agent. The article of manufacture in this embodiment of the invention may further comprise a package insert indicating that the compositions can be used to treat a particular condition. Alternatively, or additionally, the article of manufacture may further comprise a second (or third) container comprising a pharmaceutically-acceptable buffer, such as bacteriostatic water for injection (BWFI), phosphate-buffered saline, Ringer's solution and dextrose solution. It may further include other materials desirable from a commercial and user standpoint, including other buffers, diluents, filters, needles, and syringes.

### EXAMPLES

### Example 1: Isolation of Anti-CD3 Antibodies from Immunized Mice, and Generation and Isolation of Humanized and Optimized Variants

[0311] Immunizations were carried out as in FIG. 1. Briefly, balb/c mice were immunized with a primary immunization with 1.0×10⁶ human T cells (which express CD3 epsilon) and Sigma® adjuvant in each of ten mice. Twenty-eight days after the primary immunization, a first immunization boost with 1.0×10⁶ human T cells (which express CD3 epsilon) and Sigma® adjuvant was performed in each of the ten mice. Twenty-eight days after the first immunization boost, the ten mice were given a second immunization boost with 1.5×10⁶ T cells (which express CD3 epsilon) and Sigma® adjuvant; however, for this second boost, five of the mice received human T cells (which express CD3 epsilon) and the other five mice received cynomolgus (cyno) T cells (which express cyno CD3 epsilon). Forty-two days after the second immunization boost, all ten mice received a third immunization boost of fifty micrograms of denatured recombinant cyno CD3epsilon protein mixed with seven micrograms of a peptide-BSA conjugate in which the peptide corresponded to an N-terminal peptide of the native cyno CD3 epsilon protein. Seven days after the third immunization boost, the ten mice were sacrificed and spleens were harvested for B cell sorting.

[0312] Splenic B cells obtained from the harvested spleens were stained with 50 nM recombinant, biotinylated CD3epsilon using routine methods (see, e.g., Tiller et al, J Immunol Methods, Vol. 329, pages 112-124, doi: 10.1016/j.jim.2007.09.017 (2008). CD3epsilon-specific B cells were single-cell sorted by flow cytometry using standard methods (see, e.g., Tiller et al, J Immunol Methods, Vol. 329, pages 112-124, doi:10.1016/j.jim.2007.09.017 (2008); WO 2009/036379; WO 2010/105256; and WO 2012/009568). Cognate heavy and light chain pairs were amplified by single-cell PCR using a previously described primer set (see, e.g., Tiller et al, J Immunol Methods, Vol. 329, pages 112-124, doi:10.1016/j.jim.2007.09.017 (2008). An exemplary flow cytometry-based sorting result is depicted in FIG. 2, in which 48 cells were isolated and sorted from each of the cyno-boosted (middle flow plot of FIG. 2) and human-boosted (right flow plot of FIG. 2) sets of mice. Amplicons were confirmed by agarose gel electrophoresis (FIG. 3) and transformed into a highly-engineered strain of Saccharomyces cerevisiae (see, e.g., Xu et al., Protein EngDes Sel. Vol. 26(10), pages 663-670 (2013) doi: 10.1093/protein/gzt047; Sivasubramanian et al., MAbs. Vol. 9(1), pages 29-42 (2017) doi: 10.1080/19420862.2016.1246096; WO 2009/036379; WO 2010/105256; and WO 2012/009568).

[0313] Antibodies were expressed in Saccharomyces cerevisiae, purified using standard procedures, and assayed for binding activity (see, e.g., Xu et al., Protein Eng Des Sel. Vol. 26(10), pages 663-670 (2013) doi: 10.1093/protein/gzt047; Sivasubramanian et al., MAbs. Vol. 9(1), pages 29-42 (2017) doi: 10.1080/19420862.2016.1246096; WO 2009/036379; WO 2010/105256; and WO 2012/009568. Twenty-one clones bound to recombinant human CD3 epsilon (see, e.g., FIG. 4A for relative binding affinities, and FIG. 4B for antibody identities and sequence information associated with each of the 21 clones). Of these 21 clones, 14 also bound T cell-surface expressed CD3 epsilon (see, collectively, FIGS. 5, 6, and FIG. 7). Of these 14 clones that bind T cell-surface expressed CD3epsilon, six of these were cyno CD3 epsilon-specific (see FIG. 5), while eight of these bound both human- and cyno-CD3 epsilon (see FIGS. 6 and 7). Competitive binding assays showed that all of the CD3 epsilon-binding clones bound to epitopes overlapping that of I2C and did not compete significantly with OKT3 (FIG. 8).

[0314] The three highest affinity CD3 binding clones (ADI-15512, ADH-15516, and ADI-16513; see, e.g., FIG. 9) were selected for humanization. In that effort, twelve humanized variants were generated for each clone (36 variants in total) and tested for cell binding activity (see FIG. 10A for sequence and germline information for each of these variants vs. the respective parents, ADI-15512, ADI-15516, and ADI-16513). Most of the humanized variants showed similar or improved cell binding profiles compared with the chimeric parents (see, e.g., FIGS. 10B, 10C, and 10D, for comparison of cell binding profiles of humanized variants and chimeric parents of ADI-15512, ADI-15516, and ADI-16513, respectively).

[0315] Six of the humanized variants, ADI-18565, ADI-18576, ADI-18585, ADI-18589, and ADI-18590, were selected for affinity-based optimization based on their binding (see, e.g., FIGS. 10B, 10C, 10D, 11A, 11B, 11C, and 13) and polyreactivity profiles (see, e.g., FIGS. 12A and 12B). Affinity maturation was performed by generating libraries of antibody variants containing mutations in the VH and/or VL of each of the afore-mentioned clones, and selecting for improved binding by flow cytometry (see, e.g., WO 2009/036379; WO 2010/105256; WO 2012/009569; Xu et al., Protein Eng Des Sel. Vol. 26(10), pages 663-670 (2013) doi: 10.1093/protein/gzt047; and Sivasubramanian et al., MAbs. Vol. 9(1), pages 29-42 (2017) doi: 10.1080/19420862.2016.1246096).

[0316] Optimization Cycle 1: VH and VK Mutagenesis.

[0317] For the first optimization cycle (“Cycle 1”), error-prone PCR was performed on both of the antibody VH and VL genes using standard methods and subsequently transformed into yeast using homologous recombination. Briefly, a diversified antibody library was created by introducing stochastic diversity (using standard molecular cloning error-prone PCR techniques) across the heavy and light chain variable domain regions of each antibody. This resulted in a library of roughly 10⁸ in size that were ready for selection to enrich for progeny with improved affinity. Selection pressures included human (Hu) and cynomolgus (Cy) CD3εδ heterodimeric Fc fusion monomer (hereafter Hu CD386 Fc and Cy CD3εδ Fc, respectively; see FIG. 18) antigen titration, biotinylated Hu CD3ε N-terminal peptide (CD3εN27 and CD3εN13 having the sequences described in Materials and Methods) antigen titration, and parental antibody Fab competition. Flow cytometry (FACS) methodology was employed to visualize and select, using standard techniques, the desired population to carry forward into additional selection rounds (see, e.g., Chao et al. Nature Protocols, 2006, WO 2009/036379; WO 2010/105256; WO 2012/009569; Xu et al., Protein Eng Des Sel. Vol. 26(10), pages 663-670 (2013) doi: 10.1093/protein/gzt047; and Sivasubramanian et al., MAbs. Vol. 9(1), pages 29-42 (2017) doi: 10.1080/19420862.2016.1246096). After several rounds of enrichment, yeast were plated to obtain colonies representing monoclonal antibody isolates, which were then sequenced by standard Sanger methodology, produced, and characterized as in the humanization selection described above (see, e.g., FIG. 14 for a depiction of an exemplary FACS experiment and the resulting output population). Antibodies identified from the output with improved cell binding affinities were subject to a second cycle of mutagenesis and selection using similar methods as those described above.

[0318] Optimization Cycle 2; HC×LC Chain Shuffle.

[0319] A second effort was undertaken to affinity-mature human/cyno cross-reactive antibodies derived from the ADI-18589 and 18590 lineages (“Cycle 2”; see, e.g., FIG. 15 for exemplary FACS experiment and resulting output population). Briefly, antibody HC and LC were shuffled to create a combinatorial library in yeast for each of the starting parent antibodies and the library was subjected to rounds of affinity pressure similar to Cycle 1. Terminal round output monoclonal antibodies were sequenced, produced, and characterized. All of the clones selected from the second cycle of affinity maturation showed high affinity binding to cell-surface CD3 (see FIG. 16), and had mutations in both the VH and VK regions relative to the parent clones (i.e., ADI-18589 and ADI-18590). Each exhibited Fab monovalent affinities to Hu CD3εδ Fc in the 13-142 nM K_{D} range and Fab monovalent affinities to Cy CD3εδ Fc in the 15-109 nM K_{D} range as determined by ForteBio Octet BLI measurement.

[0320] In order to ascertain the functional activity of the CD3 binders, a T-cell based IL-2 secretion assay—a measure of T-cell activation—was performed using two exemplary CD3 binders of the invention (ADI-20582 and ADI-20566) in comparison with I2C, an isotype control, and buffer alone (DPBS). The results, depicted in FIG. 17, demonstrate that the exemplary CD3 binders elicited robust IL-2 release by CD3+ Jurkat T-cells relative to CD3-control T-cells, at a level meeting or exceeding that observed with the I2C control. Accordingly, CD3 binders of the present invention elicit potent T-cell activation.

[0321] Optimization Cycle 3; CDR H3 Mutagenesis and Rational Combination.

[0322] Subsequently, a single clone (ADI-20580) identified in the Cycle 2 optimization effort was selected for further optimization error (“Cycle 3”) via H3 mutagenesis. H3 mutagenesis libraries were generated using standard oligo-based methods (e.g., NNK-based methods) and transformed into Saccharomyces cerevisiae using homologous recombination (see, e.g., Lee et al, J. Mol. Biol. Vol. 340, pages 1073-1093 (2004); WO 2009/036379; WO 2010/105256; and WO 2012/009569). Briefly, mutagenic oligonucleotides encoding site saturation (NNK nucleotide) mutagenesis at every pair of residues in combinatorial fashion were used to construct a library of theoretical diversity exceeding 2.6×10⁴ (FIG. 19). The library was subjected to two rounds of affinity pressure using titration of the CD3εN13 peptide from 100-10 nM by flow cytometry generally as described above (see FIG. 20 for depiction of FACS results). Selected progeny were sequenced, produced, and characterized. Mutations observed in ADI-21970 and ADI-21961 and were rationally combined on the basis of observed affinity improvement. The mutation observed in ADI-21960 was also included based on H3 repeat frequency to generate rational, combinatorially combined variants based on mutations observed in five selected clones (FIG. 22). Several clones showed improved binding affinity and cell staining compared to ADI-20580, while also showing a decrease in polyspecific reactivity (PSR) score (see FIGS. 21 and 22). ADI-21978 was chosen for scFv conversion and rational engineering of potential sequence degradation motifs.

[0323] Optimization Cycle 4; Rational Mutagenesis Ofpotential Degradation Sequence Motifs.

[0324] ADI-21978 was observed potential sequence degradation motifs NG (Asn-Gly) and DP (Asp-Pro) in CDR H2, DG (Asp-Gly) in CDR H3, and NS (Asn-Ser) in CDR L1. These sites were rationally mutated to according to the following substitutions: NG->EG (Glu-Gly) or NA (Asn-Ala), DP->QP (Gln-Pro) or DA (Asp-Ala), DG->EG or DA, and NS->ES (Glu-Ser) or NA. The four sites were combined in a combinatorial matrix and the variant IgG were produced and characterized. Individual site substitutions were well tolerated, particularly mutations of the second position to Ala (i.e. NG->NA, DG->DA, etc.). Comparison of ADI-22523 (all four sequence liability sites) to individual VH Ala substitutions showed a <2-fold reduction in monovalent (Fab) affinity for Cy CD3εδ and resolution of all four sites had a modest effect on avid (IgG) affinity for Hu CD3εδ(see FIGS. 23A and 23B). The resulting quadruple Ala variant ADI-25133 (ADI-26906) was used to compose a panel of bispecifics and for further CDR H3 mutagenesis.

[0325] Additionally, ADI-26906 was also converted to an scFv format using the same method as described for ADI-21978 and ADI-21952 and, as with those other scFv conversions, cell binding analysis revealed that conversion was well-tolerated. Optimized scFvs were tested for developability and thermostability.

[0326] Optimization Cycle 5; CDR H3 Mutagenesis Focused on DG Sequence Motif.

[0327] ADI-21978 (ADI-22523) was diversified by site-saturation (NNK) mutagenesis targeting the degradation motif DG in CDR H3. In brief, every residue of the H3 was mutated in combination with the first or second position of the Asp-Gly site (FIG. 24). A single round of FACS selection using the CD3εN13 peptide at 100 nM and 10 nM was conducted and the output sequenced, produced, and characterized. Only mutation of the Gly residues of the Asp-Gly motif produced binders, and all progeny showed some reduction in binding affinity relative to the parent (ADI-21978 (ADI-22523)).

[0328] Cycle 6; Affinity Modulation by Rational Combination.

[0329] ADI-25133 (ADI-26906) was rationally variegated by a matrix of CDR H2 and H3 sequences known to affect affinity with CDR L1 and L3 sequences known to affect affinity to yield a panel of 68 combinations (FIG. 25A). The resulting sequence-confirmed antibodies were produced in yeast and characterized for recombinant antigen and cell binding. Monovalent Fab binding affinity spanned a range of nM-μM and correlated with cell binding median MFI at 100 nM IgG test concentration (FIGS. 25B and 25C). IFNγ production from PBMC was measured for both IgG and Fab formats, using two donors.

[0330] Clones derived from Cycles 5 and 6 were then tested for their ability to elicit T-cell stimulation and activation as deduced by measured cytokine levels as described below:

[0331] Cell Lines/Primary Human Cells.

[0332] Frozen human peripheral blood mononuclear cells (PBMC) were purchased from AllCells Inc. (Alameda, Calif.)

[0333] Fresh peripheral blood mononuclear cells were purified from human whole blood from Scripps blood bank by Ficoll-Hypaque density gradient centrifugation.

[0334] Cell Culture Materials.

[0335] PBMC were cultured in RPMI-10% FBS consisted of RPMI-1640 serum-free medium supplemented with 10% fetal bovine serum (Hyclone FBS; catalog number SH30071.031R, GE Healthcare, Logan, Utah), L-glutamine (catalog number 11875-093, ThermoFisher, Waltham, Mass.), 1% penicillin/streptomycin (catalog number 15070-063, ThermoFisher), 1 mM sodium pyruvate (catalog number 11360-070, ThermoFisher), 10 mM 4-(2-hydroxyethyl)-1-piperazineethanesulfonic acid (HEPES; catalog number 15630080, ThermoFisher), and 1X non-essential amino acid (catalog number 11140-50, ThermoFisher).

[0336] Previously frozen PBMC were quick thawed in 37° C. water bath and added to pre-warmed RPMI-10% FBS media. Cells were pelleted at 300x g, re-suspended in pre-warmed media and counted before use.

[0337] Determination of Anti-CD3 Clone Activation of T Cells in PBMCs in Soluble I2G1 Format and Fab Format

[0338] Cell Stimulation Procedure

[0339] Provided anti-CD3 IgG1 or anti-CD3 Fab were diluted in RPMI-10% FBS media to 2x final concentration (10 nM and 0.3 nM). Fifty microliters of 2x final concentration antibodies and 50 μL of donor PBMC at 2×10⁵ cells/well were added to each well. Unstimulated control has RPMI-10% FBS media only, and positive control clone ADI-22523 and negative control ADI-03847 were also included in separate wells. Plates were incubated at 37° C. for 48 hours supernatant was harvested for cytokine analysis.

[0340] Measurement of T Cell Activation by Supernatant Cytokine Levels

[0341] After 48 hours of incubation, supernatant was collected for cytokine analysis by MesoScale discovery interferon-gamma tissue culture kit according to manufacturer's instruction. Supernatant was analyzed without dilution. Standard curve using recombinant cytokine was included in each plate for calculation of cytokine level in pg/ml.

[0342] Data Analysis

[0343] Cytokine Measurement by MSD.

[0344] Interferon gamma concentration (pg ml⁻¹) in supernatant was extrapolated using standard curve generated in MesoScale Discovery WorkBench software. Interferon gamma concentrations are listed as pg/ml. Antibody affinity data (Fab, IgG) to human CD3εδ was provided and are listed as Molar. Data is provided in the immediately following table (Table 1):

TABLE 1

| | A4560 | A4560 | A4560 | A4560 | D5801 | D5801 |
|---|---|---|---|---|---|---|
| | 0.3 nM | 0.3 nM | 10 nM | 10 nM | 0.3 nM | 0.3 nM |
| | Fab IFNg | IgG1 IFNg | Fab IFNg | IgG1 IFNg | Fab IFNg | IgG1 IFNg |
| ADI clone ID | (pg ml⁻¹) | (pg ml⁻¹) | (pg ml⁻¹) | (pg ml⁻¹) | (pg ml⁻¹) | (pg ml⁻¹) |
| ADI-03847 | 0 | 0 | 0 | 0 | 0 | 0 |
| ADI-22523 | 0 | 2293.197 | 148.0116 | 4687.913 | 0 | 8857.269 |
| ADI-23664 | 0 | 2725.718 | 239.8341 | 2131.418 | 0 | 4623.814 |
| ADI-23672 | 0 | 1905.496 | 56.37432 | 2320.208 | 0 | 4121.787 |
| ADI-23673 | 0 | 2005.052 | 86.91475 | 4193.993 | 0 | 2627.311 |
| ADI-26906 | 0 | 3849.833 | 70.52744 | 3983.237 | 0 | 9035.443 |
| ADI-26907 | 0 | 1484.849 | 57.70298 | 5005.116 | 0 | 7885.667 |
| ADI-26908 | 0 | 2629.234 | 20.6515 | 4618.489 | 0 | 8357.608 |
| ADI-26909 | 0 | 3533.808 | 15.25265 | 3644.966 | 0 | 5777.494 |
| ADI-26910 | 0 | 2128.518 | 37.69095 | 3142.977 | 0 | 5839.224 |
| ADI-26912 | 0 | 0 | 0 | 0 | 0 | 0 |
| ADI-26913 | 0 | 2235.181 | 0 | 3599.486 | 0 | 3239.355 |
| ADI-26915 | 0 | 0 | 2.579892 | 0 | 0 | 0 |
| ADI-26916 | 0 | 0 | 0 | 14.77678 | 0 | 0 |
| ADI-26917 | 0 | 109.1881 | 0 | 895.5244 | 0 | 60.87033 |
| ADI-26918 | 0 | 0 | 0 | 0 | 0 | 0 |
| ADI-26919 | 0 | 1221.756 | 0 | 1529.324 | 0 | 2607.514 |
| ADI-26920 | 0 | 710.0884 | 0 | 1667.536 | 0 | 787.9412 |
| ADI-26921 | 0 | 0 | 0 | 1496.688 | 0 | 86.26344 |
| ADI-26924 | 0 | 0 | 0 | 0 | 0 | 0 |
| ADI-26925 | 0 | 0 | 0 | 0 | 0 | 0 |
| ADI-26927 | 0 | 0 | 0 | 8.821052 | 0 | 0 |
| ADI-26928 | 0 | 0 | 0 | 0 | 0 | 0 |
| ADI-26929 | 0 | 0 | 0 | 0 | 0 | 0 |
| ADI-26930 | 0 | 0 | 0 | 0 | 0 | 0 |
| ADI-26932 | 0 | 0 | 0 | 0 | 0 | 0 |
| ADI-26933 | 0 | 1032.987 | 0 | 2752.275 | 0 | 660.8336 |
| ADI-26938 | 0 | 0 | 0 | 0 | 0 | 0 |
| ADI-26939 | 0 | 0 | 0 | 0 | 0 | 0 |
| ADI-26940 | 0 | 0 | 0 | 33.39678 | 0 | 0 |
| ADI-26941 | 0 | 0 | 0 | 0 | 0 | 0 |
| ADI-26942 | 0 | 0 | 0 | 0 | 0 | 0 |
| ADI-26943 | 0 | 0 | 0 | 0 | 0 | 0 |
| ADI-26944 | 0 | 0 | 0 | 0 | 0 | 0 |
| ADI-26945 | 0 | 0 | 0 | 0 | 0 | 0 |
| ADI-26950 | 0 | 0 | 0 | 0 | 0 | 0 |
| ADI-26954 | 0 | 0 | 0 | 521.1572 | 0 | 0 |
| Unstimulated | 0 | 0 | 0 | 2.045886 | 0 | 0 |
| | | | Fab KD | Fab KD | IgG KD | IgG KD |
| | D5801 | D5801 | Human | Cyno | Human | Cyno |
| | 10 nM | 10 nM | CD3εδ−Fc | CD3εδ−Fc | CD3εδ−Fc | CD3εδ−Fc |
| | Fab IFNg | IgG1 IFNg | (M) | (M) | (M) | (M) |
| ADI clone ID | (pg ml⁻¹) | (pg ml⁻¹) | Monovalent | Monovalent | Avid | Avid |
| ADI-03847 | 0 | 0 | N.B. | N.B. | N.B. | N.B. |
| ADI-22523 | 698.8879 | 11887.59 | 5.9E−09 | 4.5E−09 | 2.0E−10 | 2.2E−10 |
| ADI-23664 | 117.9867 | 5317.511 | 8.4E−09 | 8.9E−09 | 2.7E−10 | 2.8E−10 |
| ADI-23672 | 172.223 | 4722.399 | 7.7E−09 | 8.8E−09 | 2.5E−10 | 2.4E−10 |
| ADI-23673 | 185.1544 | 8565.428 | 7.6E−09 | 8.2E−09 | 2.7E−10 | 2.9E−10 |
| ADI-26906 | 371.7809 | 9707.526 | 7.7E−09 | 8.1E−09 | 1.6E−09 | 2.5E−10 |
| ADI-26907 | 335.9243 | 8561.689 | 9.6E−09 | 1.1E−08 | 1.8E−09 | 3.0E−10 |
| ADI-26908 | 257.0513 | 7867.79 | 9.1E−09 | 1.0E−08 | 1.5E−09 | 3.1E−10 |
| ADI-26909 | 101.2396 | 5639.143 | 1.4E−08 | 1.6E−08 | 1.9E−09 | 3.2E−10 |
| ADI-26910 | 163.2046 | 5640.78 | 1.4E−08 | 1.6E−08 | 1.4E−09 | 2.6E−10 |
| ADI-26912 | 0 | 0 | 1.3E−07 | 2.1E−07 | 3.0E−09 | 2.0E−09 |
| ADI-26913 | 0 | 4880.937 | 3.5E−08 | 3.8E−08 | 2.2E−09 | 4.0E−10 |
| ADI-26915 | 0 | 0 | 1.4E−07 | P.F. | 3.3E−09 | 2.6E−09 |
| ADI-26916 | 0 | 2.54948 | 1.7E−07 | 1.3E−07 | 2.9E−09 | 1.8E−09 |
| ADI-26917 | 0 | 1026.313 | 1.0E−07 | 1.2E−07 | 2.6E−09 | 1.0E−09 |
| ADI-26918 | 0 | 0 | 1.4E−06 | 2.7E−07 | 3.0E−09 | 2.2E−09 |
| ADI-26919 | 0 | 2959.607 | 5.7E−08 | 5.4E−08 | 2.3E−09 | 5.9E−10 |
| ADI-26920 | 0 | 1783.751 | 7.6E−08 | 7.6E−08 | 3.4E−09 | 7.0E−10 |
| ADI-26921 | 0 | 964.8354 | 9.5E−08 | 8.9E−08 | 3.7E−09 | 9.4E−10 |
| ADI-26924 | 0 | 0 | 2.0E−07 | 2.8E−07 | 2.8E−09 | 2.1E−09 |
| ADI-26925 | 0 | 0 | N.B. | N.B. | 1.1E−08 | 8.7E−09 |
| ADI-26927 | 0 | 8.597335 | 1.3E−07 | 1.5E−07 | 1.1E−09 | 1.1E−09 |
| ADI-26928 | 0 | 0 | N.B. | N.B. | 2.8E−09 | 2.5E−09 |
| ADI-26929 | 0 | 0 | N.B. | N.B. | 1.1E−08 | 9.7E−09 |
| ADI-26930 | 0 | 0 | N.B. | N.B. | 1.0E−08 | 8.7E−09 |
| ADI-26932 | 0 | 0 | N.B. | N.B. | 1.6E−08 | 1.3E−08 |
| ADI-26933 | 0 | 2100.075 | 5.9E−08 | 5.5E−08 | 6.7E−10 | 5.2E−10 |
| ADI-26938 | 0 | 0 | N.B. | N.B. | 1.0E−08 | 1.0E−08 |
| ADI-26939 | 0 | 0 | 3.5E−07 | 2.7E−07 | 1.9E−09 | 1.6E−09 |
| ADI-26940 | 0 | 2.8149 | 1.5E−07 | 1.5E−07 | 1.4E−09 | 1.2E−09 |
| ADI-26941 | 0 | 0 | 1.1E−06 | 2.2E−07 | 1.7E−09 | 2.2E−09 |
| ADI-26942 | 0 | 0 | N.B. | N.B. | 8.5E−09 | 7.8E−09 |
| ADI-26943 | 0 | 0 | N.B. | N.B. | 7.6E−09 | 6.6E−09 |
| ADI-26944 | 0 | 0 | N.B. | N.B. | 1.3E−08 | 1.2E−08 |
| ADI-26945 | 0 | 0 | N.B. | N.B. | 2.0E−08 | 2.1E−08 |
| ADI-26950 | 0 | 0 | N.B. | N.B. | N.B. | N.B. |
| ADI-26954 | 0 | 227.3743 | N.B. | N.B. | N.B. | N.B. |
| Unstimulated | 0 | 0 | #N/A | #N/A | #N/A | #N/A |

[0345] A subset of the data is provided in graphic representation in FIG. 25D. Among other things, a correlation of monovalent affinity with cytokine production was observed for both donors for 10 nM IgG having affinity for Hu and Cy CD3εδ Fc of at least 100 nM. Fab showed low IFNγ production by PBMC at 10 nM, but undetectable IFNγ production at 0.3 nM concentration (FIG. 25D).

[0346] scFv Conversion ofADI-21978 (ADI-22523).

[0347] VH and VL were amplified and reassembled by overlap extension PCR to generate a matrix of scFv fused to IgG1 Fc (hereafter referred to as scFv-Fc and depicted in FIG. 26A). In brief, the design matrix consisted of the VH/VK or VK/VH orientation, inclusion or exclusion of VH-144-VK100 (Kabat numbering) disulfide (DS1) (Brinkmann U. et a. PNAS 1993), tether 5 or direct fusion, linker lengths of 15, 20, 25, and 30 amino acids. A modified VH44-VK 100 disulfide (DS2) was also explored. Tether and linker sequences consisted of (Gly4Ser)_{N} repeats. The IgG1 upper hinge includes a Cys220Ser mutation in and scFv fusions were made to Glu216. Twenty-nine scFv-Fc from the ADI-21978 lineage were sequence confirmed, produced, and characterized (FIG. 26B). Recombinant CD3 and cell binding analysis revealed that scFv conversion was well tolerated, with 2-4 fold affinity reduction compared to the IgG (FIG. 26C). Many of the scFv-Fc designs exhibited a monomeric non-aggregated peak of 85-90% a (FIG. 26D). Thermal stability analysis by DSF showed that ADI-21978 scFv-Fc were generally stable, showing Tm in the range of 65-69° C. (FIG. 26E and FIG. 26F). The inclusion of DS1 and DS2 yielded scFv-Fc with parent-like HIC retention time, whereas scFv-Fc without DS1/2 had a broad peak profile and delayed retention time (FIG. 26G).

### Example 2: Generation of SP34 (Anti-CD3) Variant Antibodies: Humanization and Optimization SP34

[0348] Humanization of SP34.

[0349] Humanization of SP34 was conducted by screening an initial panel of humanization designs produced in yeast (FIG. 27). In brief, 28 designs representing combinations of four humanized VH and seven humanized VKi or VX were produced in yeast and characterized for binding to Hu CD3εδ and Cy CD3εδ Fc. Due to relatively low expression titers, five selected HuSP34 designs were produced by transient HEK and evaluated for recombinant antigen binding, cell staining, and developability profiles (FIG. 27). Of these, ADI-16606 (a combination of HC2 with LC3) was selected for having good binding and the cleanest developability profile, as indicated by AC-SINS and PSR data. Notably, background binding to CD3-expressing Jurkat cells (Jurkat CD3+), Jurkat cells not expressing CD3 (Jurkat CD3-), and Cyno HSC-F was comparable to chimeric SP34 (ChSP34).

[0350] Affinity Optimization from the HuSP34 Effort Leading to ADI-26956 and Related Antibody Variants.

[0351] A first effort was undertaken to affinity-mature the human/cyno cross-reactive humanized anti-CD3 SP34 antibody (HuSP34) ADI-16606 (see FIG. 28A for schematic of selection procedure and FIG. 28B for exemplary flow cytometry selection plots). Briefly, a diversified antibody library was created by introducing stochastic diversity across the heavy and light chain variable domain regions. This resulted in a library exceeding 10⁸ in realized diversity. Briefly, selection pressures for rounds 1 and 2 (R1 and R2) included biotinylated Hu CD3εδ Fc antigen titration from 50-5 nM, with selection of binders from the 10 nM condition gated for increased expression and antigen binding with respect to parent. In a third round (R3) antigen was titrated to 0.2 nM and selected binders, representing affinity-pressured progeny, were plated, sequenced, and produced. In a parallel effort, the R2 outputs were subjected to thermal pressure at R3. In brief, the enriched binding populations were subjected to thermal pressure by incubation of yeast at a range of temperature conditions spanning 53-65° C. for 10 min in a thermocycler. After the yeast were cooled to 4° C., 50 nM CD3εN27 antigen was applied and the optimal condition for sorting was identified. Plasmids were released from sorted yeast using a Zymo Research kit, transformed into electrocompetent E. coli, mini-prepped from E. coli, and re-transformed into the cycle 1 parent HC or LC strains for VX and VH mutagenesis, respectively. Affinity and thermal pressures yielded divergent sequence collapse and consensus motifs (FIGS. 28C and 28D). Unique clones were produced and characterized for Fab and IgG binding to recombinant Hu and Cy CD3εδ Fc antigens, Hu and Cy cell binding, IL-2 production by Jurkat cells, polyspecific reactivity (PSR), self-interaction propensity (AC-SINS), and thermal stability by DSF.

[0352] Optimization of HuSP34 Cycle 2; VH x Vλ Chain Shuffle and VH Mutagenesis and Vλ Mutagenesis.

[0353] Selected HC and LC from cycle 1 output were shuffled and diversified by error-prone PCR (FIG. 29A). Selection were carried out utilizing similar affinity and thermal pressures as cycle 1 (FIG. 29B). Unique output sequences were produced and characterized. ADI-20587, ADI-20607, and ADI-20590 were selected for another cycle of optimization.

[0354] Optimization of HuSP34 Cycle 3; Vλ Rational Combination with 3×VH.

[0355] HC from ADI-20587, ADI-20607, and ADI-20590 were used to produce a matrix with 28 rationally-designed LC (FIG. 30). The LC combined the most favorable mutations selected in cycles 1 and 2. In brief, VX mutations that increase thermal stability (F11L, T27A, T74I, A78V, D81E, S84A, and S93N), improve expression (R24G), decrease PSR (N52D), and improve affinity (A89V and L95H) were combined. Sequence-confirmed clones were produced and characterized. ADI-21952, a combination of the HC from ADI-20587 and a designed LC carrying the mutations F11L, R24G, N52D, D81E, S84A, and L95H, was selected for further due to a combination of affinity, cell binding, IL-2 production, thermal stability, and PSR.

[0356] Optimization of HuSP34 Cycle 4; Rational Mutation Ofpotential Degradation Sequence Motifs.

[0357] Potential degradation motifs in ADI-21952 were observed in VH FR3, NS (Asn-Ser) and CDR H3, NG (Asn-Gly). These sites were rationally mutated to according to the following substitutions: NG->EG (Glu-Gly) or NA (Asn-Ala) and NS->ES (Glu-Ser) or NA. The two sites were combined in a combinatorial matrix and the variant IgG were produced and characterized. Comparison of ADI-21952 (parent) and ADI-23634 and ADI-23637 showed that both rational mutations of the CDR H3 NG site significantly impacted affinity whereas mutations of the FR3 NS site as observed for ADI-23633 and ADI-23636 did not significantly impact properties (FIG. 31).

[0358] Optimization Cycle 5; CDR H3 Mutagenesis to Resolve the NG Motif.

[0359] ADI-23633 was selected for diversification by site-saturation (NNK) mutagenesis targeting the degradation motif NG in CDR H3. A single round of affinity pressure using the CD3εN13 at 10 nM condition was performed. Selected progeny were produced and characterized, yielding at least two variants with comparable or improved affinity with respect to parent (FIG. 32).

[0360] Optimization Cycle 6; Affinity Modulation by Rational Combination.

[0361] ADI-21952 was rationally variegated by a matrix of CDR H1, CDR H2, and CDR H3 sequences known to affect affinity with CDR L3 sequences known to affect affinity to yield a panel of 42 combinations (FIG. 33A). The resulting sequence-confirmed antibodies were produced in yeast and characterized for recombinant antigen (FIG. 33B) and cell binding (FIG. 33C). Monovalent Fab binding affinity spanned a range of nM-μM and correlated with cell binding median MFI at 100 nM IgG test concentration (FIGS. 33B and 33C).

[0362] scFv Conversion of ADI-21952.

[0363] VH and VL were amplified and reassembled by overlap extension PCR to compose a matrix of scFv fused to IgG1 Fc. The design matrix was identical to that utilized for ADI-21978 conversion. Recombinant CD3 and cell binding analysis revealed a <2-fold reduction in affinity compared to the IgG for scFv that do not contain DS1 or DS2, but a significant decrease in affinity for disulfide-containing scFv (,-8-fold) (FIG. 34A). Many of the scFv-Fc designs exhibited a monomeric non-aggregated peak of 85-90%, a few designs showed >90% monomer content (FIG. 34B). Thermal stability analysis by DSF showed that ADI-21952 scFv-Fc were metastable, showing Tm in the range of 59-66° C. (FIG. 34C). The inclusion of DS 1 and DS2 yielded scFv-Fc with parent-like HIC retention time, whereas scFv-Fc without DS1/2 had a broad peak profile and delayed retention time (FIG. 34D).

[0364] HEK PRODUCTION PANEL OF BROAD AFFINITY FOR DEVELOPABILITY PROFILING.

[0365] A focused panel of variants representing a broad affinity range was selected for production in HEK. IgG and Fab were characterized for binding affinity to recombinant Hu and Cy CD3εδ Fc and human and cyno cell lines (FIG. 35A). Developability assays included PSR, baculovirus particle assays, HIC, SEC, AC-SINS (self-interaction), Fab Tm by DSF, transient HEK titer. Chemical integrity was assessed by inspection of the intact HC peak breadth and symmetry (se FIG. 35B). A literature control antibody, CTL-19672 (GNE 38E4 as disclosed in, e.g., US patent application publication number US 2015/0166661), and the novel lineage binder with unresolved potential degradation sites, ADI-22523, demonstrated succinimide intermediate formation under non-stress conditions (FIG. 35B). ADI-26906, which has all predicted liability sites resolved, does not show peak broadening, supporting the beneficial role of these modifications for chemical stability of the antibody.

[0366] HEK Production of CD3 x TAA Bispecifics.

[0367] Literature tumor associated antigen (TAA) binders targeting CD33 (Lintuzumab) and HER2 (Trastuzumab) were selected for assembly of bispecific molecules for functional validation, along with a negative control HEL binding antibody, ADI-03847 (FIG. 36A). As a first step, antibodies were reformatted to scFv-Fc having the IgG4 isotype and stabilizing hinge mutation Ser228Phe, produced in HEK293ADI1, and purified by CaptureSelect FcXL (GE Healthcare LifeSciences). All scFv-Fc bound only the expected target antigen (see, e.g., FIG. 36A, bottom panel). Bispecific CD3 x TAA antibodies were produced by co-transfection of HEK293ADI1 with both HC and the CD3 LC plasmids. Purification of heterodimer was achieved by pH gradient elution from POROS MabCapture A column, which was generally effective for resolving the heterodimer from the CD3 monospecific antibody (FIG. 36B). CD3/HER2 bispecifics and TAA control were tested for their ability to activate T cells in the presence and absence of HER2 expressing cells SK-BR-3 as determined by percentage CD25+CD69+T (CD8) cells upon incubation with increasing amounts of the tested antibodies (FIG. 36C). T cell activation was not observed in the absence of a HER2 binding arm except for a low level of activation observed with HuOKT3 (ADI-10390) as the CD3 arm. In the presence of target cells the ADI-21978/Trastuzumab and ADI-10390/Trastuzumab both activated T cells, but neither CD3 binder activated cells when paired with the HEL control arm.

[0368] Analysis of T-Cell Activation and Target Cell Killing.

[0369] Next, CD3/HER2 and CD3/HEL bispecifics were tested in a redirected T cell cytotoxicity assay (RTCC). ADI-21952 (ADI-24780) and ADI-21978 (ADI-24781) elicited dose-dependent target cell killing by incubated T cell effector cells at a potency (EC50) that was approximate to or better than positive controls. In particular, ADI-21978/Trastuzumab bispecific elicited target cell killing potency in the picomolar (pM) range (See, e.g., FIG. 37).

[0370] A schematic representation of the selection, humanization, and optimization procedures and clone lineages generated thereby as described in Examples 1 and 2 are provided in FIG. 38A and FIG. 38B, respectively.

### Variants

[0371] Applicant has found that introducing certain variations into CDR sequences in CD3 antibodies or antigen-binding polypeptides may confer beneficial properties, such as increased target binding affinity, resistance to degradation (e.g., by proteases), and improved developability (e.g., a reduction in polyspecificity). For example, it has been found herein that introducing a “T” at position one of CDRH3 can lead to increased target binding affinity. In some embodiments, CD3 antibodies or antigen-binding polypeptides are provided in which a “T” is introduced at position 1 of CDRH3 and are characterized by increased binding affinity to CD3 antigens.

[0372] Also, Applicant has found herein that avoiding certain consecutive amino acid sequences in CDRH2 (e.g., “NG”) and/or CDRH3 (e.g., “DG”) can increase resistance to degradation. In some embodiments, CD3 antibodies or antigen-binding polypeptides are provided in which particular amino acids are avoided at certain positions (e.g., avoiding a “G”, “N”, or “D”) in CDRH2 and/or CDRH3 and are characterized by resistance to degradation.

[0373] Additionally, Applicant has found herein that introduction of certain amino acids (e.g., “L” or “I”) in CDRL3 can improve developability (e.g., as measured by AC-SINS, HIC Retention Time, or binding to Polyspecificity Reagents). In some embodiments, CD3 antibodies or antigen-binding polypeptide are provided that have “L” or “I” substituted and are characterized by improved developability scores.

[0374] Materials and Methods

[0375] In addition to the description provided above, the following Materials and Methods were employed in the Examples.

[0376] Hu and Cy CD3&eFc Heterodimer Antigen Production.

[0377] Recombinant heterodimeric CD3 Fc fusion antigens were produced in HEK 293 cells by co-transfection of plasmids encoding Hu CD3ε Fc (ectodomain, ECD, residues 22-126) and CD3δ Fc-HIS (ECD residues 22-100) or Cy CD3ε Fc (ECD residues 22-117) and CD3δ Fc-HIS (ECD residues 22-100) utilizing a heterologous signal peptide sequence. Chromatographic separations were performed on a computer controlled ÄKTA Avant 150 preparative chromatography system (GE Healthcare Life Sciences) equipped with an integrated conductivity sensor, enabling in-line salt concentration monitoring during the run. Clarified culture supernatants were purified by Ni Sepharose 6 Fast Flow (GE Healthcare Life Sciences), which removes the CD3εε Fc-HIS homodimer. CD3εδ Fc-HIS heterodimer was resolved from CD3δδ Fc-HIS homodimer by Mono Q 10/100 GL by a linear Tris-buffered KCl gradient at pH 8.5.

[0378] Peptides.

[0379] C-terminally biotinylated CD3ε N-terminal peptides were obtained from New England Peptide. All peptides were delivered with a purity of >95%. Peptides were designed based on the primary sequence of Hu CD3F and the crystal structure of Hu CD3F6 bound to OKT3 (Kjer-Nielsen L. et al. PNAS 2004). The CD3εN27 peptide has the sequence H2N-QDGNEEMGSITQTPYQVSISGTTVILT[K/SCBiot(dPEG4)]-amide and the CD3εN13 peptide has the sequence H2N-QDGNEEMGGITQT[K/SCBiot(dPEG4)]-amide.

[0380] Antigen Biotinylation.

[0381] CD3 antigens were biotinylated using the EZ-Link Sulfo-NHS-Biotinylation Kit from Pierce. Goat anti-human F(ab′)₂ kappa-FITC (LC-FITC), Extravidin-PE (EA-PE) and streptavidin-633 (SA-633) were obtained from Southern Biotech, Sigma and Molecular Probes, respectively. Streptavidin MicroBeads and MACS LC separation columns were purchased from Miltenyi Biotec.

[0382] Cell Line Propagation and Cell Labeling Assays.

[0383] Human Jurkat CD3+ cells (ATCC TIB-152) and Jurkat CD3-cells (ATCC TIB-153) were obtained from ATCC. Cyno HSC-F cells were obtained from the NIH Non-human Primate Reagent Resource. All cell lines were cultured in RPMI 1640 GlutaMax media supplemented with 10% fetal bovine serum (FBS).

[0384] Cell labeling was conducted by aliquoting 100,000-200,000 cells per well in a 96-well assay plate. Cells were centrifugated at 500 x g for 5 min at 4° C., then resuspended in 100 μl of 100 nM IgG and incubated at room temperature for 20 min. Cells were then washed in buffer (phosphate-buffered saline (PB S)/0.1% bovine serum albumin (BSA) three times and resuspended in secondary reagent, typically goat anti-human R-PE (Southern Biotech). The plate was assayed on a FACSCanto (BD Biosciences) using an HTS sample injector. Flow cytometry data was analyzed for median fluorescence intensity in the R-PE channel.

[0385] Human PBMC Sourcing and Expansion.

[0386] Frozen human peripheral blood mononuclear cells (PBMC) were purchased from AllCells Inc. (Alameda, Calif.). Fresh peripheral blood mononuclear cells were purified from human whole blood from Scripps blood bank by Ficoll-Hypaque density gradient centrifugation.

[0387] PBMC were cultured in RPMI-10% FBS consisted of RPMI-1640 serum-free medium supplemented with 10% fetal bovine serum (Hyclone FBS; catalog number SH30071.031R, GE Healthcare, Logan, Utah), L-glutamine (catalog number 11875-093, ThermoFisher, Waltham, Mass.), 1% penicillin/streptomycin (catalog number 15070-063, ThermoFisher), 1 mM sodium pyruvate (catalog number 11360-070, ThermoFisher), 10 mM 4-(2-hydroxyethyl)-1-piperazineethanesulfonic acid (HEPES; catalog number 15630080, ThermoFisher), and 1X non-essential amino acid (catalog number 11140-50, ThermoFisher).

[0388] Previously frozen PBMC were quick thawed in 37° C. water bath and added to pre-warmed RPMI-10% FBS media. Cells were pelleted at 300×g, re-suspended in pre-warmed media and counted before use.

[0389] Peripheral Blood Mononuclear Cells (PBMC) Activation by CD3 Antibodies.

[0390] CD3 IgG and Fab were diluted in RPMI-10% FBS media to 2x final concentration (10 nM and 0.3 nM). Fifty microliters of 2x final concentration antibodies and 50 μL of donor PBMC at 2×10⁵ cells/well were added to each well. Unstimulated control has RPMI-10% FBS media only, and positive control clone ADI-22523 and negative control ADI-03847 were also included in separate wells. Plates were incubated at 37° C. for 48 hours supernatant was harvested for cytokine analysis.

[0391] Measurement of T Cell Activation by Supernatant Cytokine.

[0392] After 48 hours of incubation, supernatant was collected for cytokine analysis by MesoScale discovery interferon-gamma tissue culture kit according to manufacturer's instruction. Supernatant was analyzed without dilution. Standard curve using recombinant cytokine was included in each plate for calculation of cytokine level in pg/ml.

[0393] Interferon gamma concentration (pg/mL) in supernatant was extrapolated using standard curve generated in MesoScale Discovery WorkBench software. Interferon gamma concentrations are listed as pg/ml. Antibody affinity data (Fab, IgG) to human CD3εδ was provided and are listed as Molar.

[0394] FACS Affinity Pressured Selection Methods.

[0395] Briefly, yeast cells (at least ˜2×10⁷ cells/labeling condition) were incubated with a volume of biotinylated antigen sufficient to represent a stoichiometric excess with respect to the average IgG presentation number. Antigen labeling conditions are 100 to 1 nM under equilibrium conditions, typically carried out for 20 min to several hours at room temperature in FACS wash buffer (phosphate-buffered saline (PB S)/0.1% bovine serum albumin (BSA)). After washing three times with wash buffer, yeast were then stained with secondary reagents anti-human light chain FITC conjugate (LC-FITC) diluted 1:100 and either streptavidin-633 (SA-633) diluted 1:500 or extravidin-phycoerythrin (EA-PE) diluted 1:50 for 15 min at 4° C. After washing twice with ice-cold wash buffer, the cell pellets were resuspended in wash buffer in a typical volume of at least 1 mL per 1×10⁷ yeast and transferred to strainer-capped sort tubes. Sorting is performed using a FACS ARIA sorter (BD Biosciences) and sort gates were determined to select for binders. After the final round of sorting, yeast were plated and individual colonies picked for characterization.

[0396] FACS Thermalpressured Selection Methods.

[0397] The parent antibody was diversified by error-prone PCR to derive an optimization library in yeast. This yeast library first proceeds through a positive antigen selection round to select for expressing binders, using CD3εN27. This enriched population then proceeded through a series of thermally pressured conditions ranging from ˜50° C. up to 65° C. for 10 min with room temperature as a control. Optimally pressured conditions were gated on LC presentation (anti-human lambda PE) and antigen binding (SA-APC), reflecting the residual folded IgG competent to bind the selection reagents. Sorted cells are pelleted and the plasmids extracted using a commercial yeast plasmid purification kit (Zymo Research) in which the yeast cell walls are disrupted with Zymolase and the DNA is subsequently purified by a DNA mini-column. Plasmid DNA is then transformed into E. coli for amplification, followed by mini-prep isolation of the plasmid DNA with an E. coli plasmid purification kit (Qiagen). Plasmid DNA is then prepared for transformation into the appropriate yeast strain for subsequent cycles selection or sequencing and IgG production.

[0398] Error-Prone PCR Optimization.

[0399] Error-prone PCR-based mutagenesis of the heavy chain (VH) and/or light chain (VL) using standard molecular biology techniques introduced stochastic diversity. Briefly, mutagenic nucleotide analogues dPTP and 8-oxo-dGTP were incorporated into the VH and VL amplification process at 1 uM concentration to increase the base mis-incorporation frequency up to approx. 0.01 bp. The mutated PCR product was recombined in situ by homologous recombination with a linearized vector containing the HC or LC constant region sequences. This typically results in a library of 1×10⁷⁻⁸ diversity. Affinity and expression co-pressures were applied by incubating the antigen antibody yeast complex at decreasing concentrations of antigen (equilibrium pressure) or with parental Fab competition (equilibrium and kinetic pressures) for varying amounts of time to select for the highest affinity antibodies on FACS over successive rounds of selection.

[0400] Oligonucleotide-Based CDR H3 Mutagenesis.

[0401] Discovered or previously optimized antibodies can progress through additional optimization by diversification of the CDR H3 sequence. To do so, the light chain variable region of the starting antibody is PCR amplified, and then, using yeast homologous recombination, is inserted into a yeast strain containing the light chain empty vector. This constitutes the parental light chain yeast strain. The heavy chain of the starting antibody is used as PCR input in combination with germline specific primers that generate a PCR product that contains from framework 1 through framework three of the heavy chain. This amplification is perform using the mutagenic nucleotide 8-oxo-dGTP to provide additional low levels of mutagenesis in the amplified heavy chain region. In order to create designed diversity in the CDR H3 region of the starting antibody, a library of CDR H3 oligos is generated/ordered (i.e. from IDT). The oligo pool is amplified with primers containing 5′ tails that allow for germline specific recombination with the amplified FW1-FW3 region and the empty. A universal 3′ primer is used for FW4. Alternatively, mutagenic PCR can be performed that incorporates 8-oxo-dGTP into a PCR reaction using germline specific 5′ primers, the universal 3′ primer and VH DNA. Once the LC strain, HC FW1-FW3 and diversified CDR H3-FW4 inputs have been generated, a three piece transformation is performed by introducing the two HC components along with a HC empty vector into the LC strain. Subsequently, the cells are grown out under selective pressure to ensure HC and LC components are present.

[0402] Antibody Yeast Production and Purification.

[0403] Yeast clones were grown to saturation and then induced for 48 h at 30° C. with shaking. After induction, yeast cells were pelleted and the supernatants were harvested for purification. IgGs were purified using a Protein A column and eluted with acetic acid, pH 2.0. Fab fragments were generated by papain digestion and purified over KappaSelect or CaptureSelect IgG-CH1 (GE Healthcare LifeSciences).

[0404] Antibody HEK Production and Purification.

[0405] Mammalian expression of IgG was done by sub-cloning antibodies into a new expression vector followed by transient transfection and expression in HEK293ADI1, a monoclonal cell line derived from HEK293 (DSMZ) selected for clump-free growth, growth rate, and transfectability. Briefly, expression vectors containing the antibody of interest were transfected by complexing with a transfection reagent followed by exposure to HEK cells for one hour followed by dilution of culture media to a final density of 4 million cells per mL. The cells were then cultured for 7 days with fresh feed media every 48 hours. After 7 days, the supernatant was collected following centrifugation and purification was performed using protein A. If necessary, a CHT column purification was added to reach >95% monomer.

[0406] Bispecific Antibody HEK Production and Purification.

[0407] IgG4 scFv-Fc molecules carrying the ProA non-binding His435->Arg, Tyr436->Phe (“RF”) mutations were purified by CaptureSelect™ FcXL (GE HealthCare) and eluted with acetic acid pH 3.5.

[0408] Bispecific antibodies were expressed in HEK293ADI1 cells grown in shake flasks. To obtain clearance of the ProA non-binding RF homodimer, primary capture was performed using a Mab Select SuRE column, eluted with acetic acid, pH 3.5 and neutralized with 2M HEPES pH 8.0. Heterodimer was then isolated by a secondary purification on a POROS MabCapture A column, and linear gradient elution of 40 mM acetic acid, 500 mM NaCl from pH 6.0 to pH 3.0. Fractions were neutralized with 2M HEPES pH 8.0, pooled to avoid inclusion of aggregates appearing at the tail of the heterodimer peak, and analyzed by LCMS to ensure heterodimer purity.

[0409] ForteBio KD Measurements (Biolayer Interferometry; BLI).

[0410] ForteBio affinity measurements were performed generally as previously described (Estep, P., et al., High throughput solution-based measurement of antibody-antigen affinity and epitope binning. MAbs, 2013. 5(2): p. 270-8.). Briefly, ForteBio affinity measurements were performed by loading IgGs online onto AHQ sensors. Sensors were equilibrated off-line in assay buffer for 30 min and then monitored on-line for 60 seconds for baseline establishment. Sensors with loaded IgGs were exposed to 100 nM antigen for 5 min, afterwards they were transferred to assay buffer for 5 min for off-rate measurement. Kinetics was analyzed using the 1:1 binding model.

[0411] BiaCore KD Measurements (Surface Plasmon Resonance; SPR).

[0412] Biosensor analysis was conducted at 25° C. in a HBS-EP buffer system (10 mM HEPES pH 7.3, 150 mM NaCl, 3 mM EDTA, 0.05% Surfactant P20) using a Biacore 8K optical biosensor docked with a CM5 sensor chip (GE Healthcare, Marlboro, MA). The sample hotel was maintained at 10° C. Goat anti-human IgG capture antibody (Jackson ImmunoResearch Laboratories, Inc., West Grove, Pa.; 109-005-098) was immobilized (11700+/−400 RU) to both flow cells of the sensor chip using standard amine coupling chemistry. This surface type provided a format for reproducibly capturing fresh analysis antigen after each regeneration step. Flow cell 2 was used to analyze captured antigen (35.7+/−0.8 RU) while flow cell 1 was used as a reference flow cell. Fab concentrations ranging from 100 to 0.412 nM (3-fold dilutions) were prepared in running buffer. Each of the Fab sample concentrations were run as a single replicate. Two blank (buffer) injections also were run and used to assess and subtract system artifacts. The association and dissociation phases for all Fab concentrations were monitored for 180 s each, at a flow rate of 30 L/min. The surface was regenerated with 10 mM glycine, pH 1.5 for 30 s, at a flow rate of 30 L/min. The data was aligned, double referenced, and fit using Biacore 8K Evaluation Software, version 1.0.

[0413] Octet Red384 Epitope Binning/Ligand Blocking.

[0414] Epitope binning/ligand blocking was performed using a standard sandwich format cross-blocking assay. Control anti-target IgG was loaded onto AHQ sensors and unoccupied Fc-binding sites on the sensor were blocked with an irrelevant human IgG1 antibody. The sensors were then exposed to 100 nM target antigen followed by a second anti-target antibody or ligand. Data was processed using ForteBio's Data Analysis Software 7.0. Additional binding by the second antibody or ligand after antigen association indicates an unoccupied epitope (non-competitor), while no binding indicates epitope blocking (competitor or ligand blocking).

[0415] Size Exclusion Chromatography.

[0416] A TSKgel SuperSW mAb HTP column (22855) was used for fast SEC analysis of yeast and mammalian produced mAbs at 0.4 mL/min with a cycle time of 6 min/run. 200 mM Sodium Phosphate and 250 mM Sodium Chloride was used as the mobile phase.

[0417] Dynamic Scanning Fluorimetry (DSF).

[0418] 10 μL of 20× Sypro Orange is added to 20 μL of 0.2-1 mg/mL mAb or Fab solution. A RT-PCR instrument (BioRad CFX96 RT PCR) is used to ramp the sample plate temperature from 40 to 95° C. at 0.5° C. increments, with 2 min equilibrate at each temperature. The negative of first derivative for the raw data is used to extract Tm.

[0419] PSR Preparation.

[0420] Polyspecific reactivity reagent (PSR) was prepared as described in, e.g., WO 2014/179363 and Xu et al., mAbs, 2013. In brief, 2.5 liters CHO-S cells were used as starting material. The cells were pelleted at 2,400×g for 5 min in 500 mL centrifuge bottles filled to 400 mL. Cell pellets were combined and then resuspended in 25 ml Buffer B and pelleted at 2,400×g for 3 min. The buffer was decanted and the wash repeated one time. Cell pellets were resuspend in 3x the pellet volume of Buffer B containing 1 x protease inhibitors (Roche, Complete, EDTA-free) using a polytron homogenizer with the cells maintained on ice. The homogenate was then centrifuged at 2,400×g for 5 min and the supernatant retained and pelleted one additional time (2,400×g/5 min) to ensure the removal of unbroken cells, cell debris and nuclei; the resultant supernatant is the total protein preparation. The supernatant was then transferred into two Nalgene Oak Ridge 45 mL centrifuge tubes and pelleted at 40,000×g for 40 min at 4° C. The supernatants containing the Separated Cytosolic Proteins (SCPs) were then transferred into clean Oak Ridge tubes, and centrifuged at 40,000×g one more time. In parallel, the pellets containing the membrane fraction (EMF) were retained and centrifuged at 40,000 for 20 min to remove residual supernatant. The EMF pellets were then rinsed with Buffer B. 8 mL Buffer B was then added to the membrane pellets to dislodge the pellets and transfer into a Dounce Homogenizer. After the pellets were homogenized, they were transferred to a 50 mL conical tube and represented the final EMF preparation.

[0421] One billion mammalian cells (e.g. CHO, HEK293, Sf9) at ˜10⁶-10⁷ cells/mL were transferred from tissue culture environment into 4x 250 mL conical tubes and pelleted at 550 x g for 3 min. All subsequent steps were performed at 4° C. or on ice with ice-cold buffers. Cells were washed with 100 mL of PBSF (lx PBS+1 mg/mL BSA) and combined into one conical tube. After removing the supernatant, the cell pellet was then re-suspended in 30 mL Buffer B (50 mM HEPES, 0.15 M NaCl, 2 mM CaCl₂, 5 mM KCl, 5 mM MgCl₂, 10% Glycerol, pH 7.2) and pelleted at 550 x g for 3 min. Buffer B supernatant was decanted and cells re-suspended in 3x pellet volume of Buffer B plus 2.5x protease inhibitor (Roche, cOmplete, EDTA-free). Protease inhibitors in Buffer B were included from here on forward. Cells were homogenized four times for 30 sec pulses (Polyton homogenizer, PT1200E) and the membrane fraction was pelleted at 40,000×g for 1 hour at 4° C. The pellet is rinsed with 1 mL Buffer B; the supernatant is retained and represents the s. The pellet is transferred into a Dounce homogenizer with 3 mL of Buffer B and re-suspended by moving the pestle slowly up and down for 30-35 strokes. The enriched membrane fraction (EMF) is moved into a new collection tube, rinsing the pestle to collect all potential protein. Determine the protein concentration of the purified EMF using the Dc-protein assay kit (BioRad). To solubilize the EMF, transfer into Solubilization Buffer (50 mM HEPES, 0.15 M NaCl, 2 mM CaCl₂, 5 mM KCl, 5 mM MgCl₂, 1% n-Dodecyl-b-D-Maltopyranoside (DDM), lx protease inhibitor, pH 7.2) to a final concentration of 1 mg/mL. Rotate the mixture overnight at 4° C. rotating followed by centrifugation in a 50 mL Oak Ridge tube (Fisher Scientific, 050529-ID) at 40,000×g for 1 hour. Collect the supernatant which represents the soluble membrane proteins (SMPs) and quantify the protein yield as described above.

[0422] For biotinylation, prepare the NHS-LC-Biotin stock solution according to manufacturer's protocol (Pierce, Thermo Fisher). In brief, 20 l of biotin reagent is added for every 1 mg of EMF sample and incubated at 4° C. for 3 hours with gentle agitation. Adjust the volume to 25 mL with Buffer B and transfer to an Oak Ridge centrifuge tube. Pellet the biotinylated EMF (b-EMF) at 40,000×g for 1 hour, and rinse two times with 3 mL of Buffer C (Buffer B minus the glycerol) without disturbing the pellet. Remove the residual solution. Re-suspended the pellet with a Dounce homogenizer in 3 mL of Buffer C as described previously. The re-suspended pellet now represents biotinylated EMF (b-EMF). Solubilized as described above to prepare b-SMPs.

[0423] PSR Binding Analyses.

[0424] Assays were performed generally as described in, e.g., Xu et al. To characterize the PSR profile of monoclonal antibodies presented on yeast, two million IgG-presenting yeast were transferred into a 96-well assay plate and pellet at 3000 x g for 3 min to remove supernatant. Re-suspend the pellet in 50 l of freshly prepared 1:10 dilution of stock b-PSRs and incubate on ice for 20 minutes. Wash the cells twice with 200 μl of cold PBSF and pellet re-suspended in 50 μl of secondary labeling mix (Extravidin-R-PE, anti-human LC-FITC, and propidium iodide). Incubate the mix on ice for 20 minutes followed by two washes with 200 ul ice-cold PBSF. Re-suspend the cells in 100 l of ice-cold PBSF and run the plate on a FACSCanto (BD Biosciences) using HTS sample injector. Flow cytometry data was analyzed for mean fluorescence intensity in the R-PE channel and normalized to proper controls in order to assess non-specific binding. Numerous methods for presentation or display of antibodies or antibody fragments on the surface of yeast have been described previously, all of which are consistent with this protocol (Blaise et al., 2004, Boder and Wittrup, 1997, Kuroda and Ueda, 2011, Orcutt and Wittrup, 2010, Rakestraw et al., 2011, Sazinsky et al., 2008, Tasumi et al., 2009, Vasquez et al., 2009).

[0425] Baculovirus Particle Assay (BVP).

[0426] BVPs (BlueSky Biotech) were incubated on ELISA plates by adding 50 μl of 1:1 BVP stock: 50 mM sodium carbonate (pH 9.6) per well and placed at 4° C. for 16-24 h. The next day, unbound BVPs were aspirated from the wells. All remaining steps were performed at room temperature (22° C.). One hundred microliters of blocking buffer (PBS with 0.5% BSA) was added and let incubate for 1 h prior to three washes with 100 μl of PBS. Next, 50 μl of 1 μM primary antibodies (i.e. test antibodies) in blocking buffer was added to the wells and incubated for 1 h followed by six washes with 100 μl of PBS. Fifty microliters of anti-Human-IgG-HRP (Promega W4038, prepared in PBS) was added to the wells and incubated for 1 h followed by six washes as before. Finally, 50 μl of TMB substrate (Fisher Scientific, 34021) was added to each well and incubated for 10⁻¹⁵ min. The reactions were stopped by adding 50 μl of 2 M sulfuric acid to each well. The absorbance was read at 450 nm and BVP score determined by normalizing absorbance by control wells with no test antibody.

[0427] ForteBio Kinetics.

[0428] FortBio Octet HTX instruments were used in 12 channel mode (8 sensors per channel, 96 sensors per experiment) with either AHC, SA, or AHQ sensors. Instrumentation was driven by manufacturer supplied software (versions 8.2 and 9.0). Sample names and concentrations were input into the plate data page, and sensor associated proteins were identified in the “information” column on the sensor data page. Kinetic experiments are collected with either a 90 or 180 s baseline, 180 s association phase, and 180 s dissociation phase. Binning experiments were collected in 5 steps: 90 s of baselinel, 90 s of a sensor binding check with the secondary binder, 90 s of baseline2, 180 s of association, and 180 s of dissociation in the well containing the secondary mAb. All files were saved into a shared network drive with a naming convention that identifies the format of the experiment.

[0429] HIC.

[0430] IgG1 samples were buffer exchanged into 1 M ammonium sulfate and 0.1 M sodium phosphate at pH 6.5 using a Zeba 40 kDa 0.5 mL spin column (Thermo Pierce, cat #87766). A salt gradient was established on a Dionex ProPac HIC-10 column from 1.8 M ammonium sulfate, 0.1 M sodium phosphate at pH 6.5 to the same condition without ammonium sulfate. The gradient ran for 17 min at a flow rate of 0.75 ml/min. An acetonitrile wash step was added at the end of the run to remove any remaining protein and the column was re-equilibrated over 7 column volumes before the next injection cycle. Peak retention times were monitored at A280 absorbance and concentrations of ammonium sulfate at elution were calculated based on gradient and flow rate.

[0431] LCMS.

[0432] mAb samples were reduced by DTT, followed by middle down LCMS analysis on a Bruker maXis4G mass spectrometer coupled with an Agilent 1100 HPLC (Agilent). A POROS R2 10 μm (2.1×30 mm) reversed phase column was used to remove salt in the samples. A fast LC flow at 2 mL/min allows the separation between sample and salt and elution of samples and regeneration of column to finish within a 2.1 min cycle. A T-junction is used to deliver only 0.15 mL/min sample flow into the mass spectrometer for sample analysis. The Bruker maXis 4G mass spectrometer was run in positive ion mode with detection in the range of 750 to 2500 m/z. The remaining source parameters were set as follows; the capillary was set at 5500V, the Nebulizer at 4.0 Bar, dry gas at 4.0 l/min, and dry temp set at 200° C.

[0433] The MS spectra were analyzed using Bruker Data Analysis version 4.1 and the deconvolution was accomplished using maximum entropy deconvolution with a mass range of 20 to 30 kDa.

[0434] IL2 Secretion.

[0435] Coat a flat-bottom 96-well culture plate (Thermo Scientific, 446612) with 200 ul per well of anti-CD3 antibody at 10 μg/mL concentration in sterile DPBS; cover with lid and incubate overnight at 4° C. Just before adding cells the following day, wash the 96-well culture plate 3 times with 200 l of ice-cold sterile DPBS. In parallel, prepare the cells. Measure the cell density, and calculate the total number of CD3+ and CD3-cells to achieve 1×10⁶ cells/well. Aliquot the required amount of cells into a 50 mL conical tube, and then wash cells 3X in 50 mL of warm (37° C.) RPMI 1640 GlutaMAX (Gibco, 61870-127). Resuspend the cells in warm culture media containing soluble anti-CD28 antibody (BioLegend) at a concentration of 2 μg/mL, for a cell density of 1×10⁷ cells/mL. Dispense 100 ul, containing 1.0×10⁶ cells, per well onto anti-CD3-coated cell culture plate. Cover the plate with the hard plastic plate lid and incubate in stationary incubator at 37° C. for 14-16 h. The next day, harvest the contents of each well by carefully pipetting, and then transfer the cells and supernatants to a 96-well plate (Thermo Scientific, 264623). Centrifuge the plate at 500 x g for 3 min to pellet the cells. Without disturbing the pellet, carefully transfer the supernatant to a new Eppendorf tube or Canto plate. Gather and prepare all reagents to be used in the MSD kit (Meso Scale Discovery IL-2 V-Plex Kit, K151QQD-2). Serially dilute the IL-2 calibrator with Diluent 2 to generate a set of 7 points for a standard curve, in addition to a zero sample containing only Diluent 2. Transfer 50 μl of each standard to each well in one column of an MSD plate, ensuring the entire bottom of the well is coated. Transfer 50 l of sample from each well to the MSD plate. Ensure the liquid completely coats the entire bottom of each well, including both electrodes. Cover the MSD plate with clear film, and incubate it on a plate shaker for 2 h at 700 rpm at room temperature (22-25° C.). After 2 h, flick and blot the plate on a paper towel, and wash three times with 150 ul wash buffer, flicking to get rid of buffer between washes. After the final wash, blot the plate on a paper towel to remove any remaining buffer. Add 25 μl of IL-2 detection antibody solution to the bottom of each well. Cover the MSD plate with clear film, and incubate it on a plate shaker for 1-2 h at 700 rpm at room temperature. After 2 h, flick and blot the plate on a paper towel, and then wash three times with 150 ul wash buffer. Add 150 l of 2X read buffer with surfactant to each well, and analyze the plate (or selected wells of the plate) on the MSD instrument.

[0436] An informal sequence listing is provided in Table 2, below. The informal sequence listing provides the following sixteen (16) sequence elements contained in each of 405 antibodies, identified as described above and designated as Antibody Numbers (Ab #) 1 through 405, in the following order:
[0437] Heavy chain variable region (“HC”) nucleic acid sequence
[0438] Heavy chain variable region (“HC”) amino acid sequence
[0439] Heavy chain variable region CDR H1 (“H1”) amino acid sequence
[0440] Heavy chain variable region CDR H1 (“H1”) nucleic acid sequence
[0441] Heavy chain variable region CDR H2 (“H2”) amino acid sequence
[0442] Heavy chain variable region CDR H2 (“H2”) nucleic acid sequence
[0443] Heavy chain variable region CDR H3 (“H3”) amino acid sequence
[0444] Heavy chain variable region CDR H3 (“H3”) nucleic acid sequence
[0445] Light chain variable region(“LC”) nucleic acid sequence
[0446] Light chain variable region (“LC”) amino acid sequence
[0447] Light chain variable region CDR L1 (“Li”) amino acid sequence
[0448] Light chain variable region CDR L1 (“L1”) nucleic acid sequence
[0449] Light chain variable region CDR L2 (“L2”) amino acid sequence
[0450] Light chain variable region CDR L2 (“L2”) nucleic acid sequence
[0451] Light chain variable region CDR L3 (“L3”) amino acid sequence
[0452] Light chain variable region CDR L3 (“L3”) nucleic acid sequence

Lengthy table referenced here
US20200190189A1-20200618-T00001
Please refer to the end of the specification for access instructions.

Lengthy table referenced here
US20200190189A1-20200618-T00002
Please refer to the end of the specification for access instructions.

Lengthy table referenced here
US20200190189A1-20200618-T00003
Please refer to the end of the specification for access instructions.

Further embodiments are enumerated in clauses below.

[0453] 1. An antibody comprising an anti-cluster of differentiation three (CD3) binding domain, wherein said antibody displays an enhanced developability profile relative to one or more of: trastuzumab; (Herceptin®); lintuzumab; blinatumomab (Blincyto®); and Mab 364, Mab366, Mab 367, Mab 368, Mab 369, Mab 370, or Mab 22, as provided in Table 2.

[0454] 2. The antibody according to Clause 1, wherein the enhanced developability profile is obtained by performing a PSR assay; an SCP assay; AS-CINS; a BVP assay; an ELISA; a DSF assay; a Tm assay; a HIC assay; a CIC assay; or combinations thereof.

[0455] 3. An antibody comprising a CD3 binding domain, wherein said antibody displays a developability score of: between about 0 MFI and about 500 MFI; between about 0 MFI and about 450 MFI; between about 0 MFI and about 400 MFI; between about 0 MFI and about 350 MFI; between about 0 MFI and about 300 MFI; between about 0 MFI and about 250 MFI; between about 0 MFI and about 200 MFI; between about 0 MFI and about 150 MFI; between about 0 MFI and about 100 MFI; between about 0 MFI and about 50 MFI; between about 200 MFI and 500 MFI; between about 200 MFI and about 450 MFI; between about 200 MFI and about 400 MFI; between about 200 MFI and about 350 MFI; between about 200 MFI and about 300 MFI; between about 200 MFI and about 250 MFI; between about 100 MFI and about 450 MFI; between about 100 MFI 300 MFI; between about 200 MFI and about 250 MFI; between about 100 MFI and about 450 MFI; between about 100 MFI and about 400 MFI; between about 100 MFI and about 350 MFI; between about 100 MFI and about 300 MFI; between about 100 MFI and about 250 MFI; between about 100 MFI and about 200 MFI; or between about 100 MFI and about 150 MFI.

[0456] 4. The antibody according to Clause 3, wherein the developability score is obtained by performing a PSR assay, an SCP assay AS-CINS; a BVP assay; an ELISA; a DSF assay; a Tm assay; a HIC assay; a CIC assay; or combinations thereof.

[0457] 5. An antibody comprising a CD3 binding domain, wherein said antibody displays a normalized developability score of between about 0.0 and about 0.6; between about 0.0 and about 0.57; between about 0.0 and about 0.55; between about 0.0 and about 0.53; between about 0.0 and about 0.51; between about 0.0 and about 0.49; between about 0.0 and about 0.47; between about 0.0 and about 0.45; between about 0.0 and about 0.43; between about 0.0 and about 0.41; between about 0.0 and about 0.39; between about 0.0 and about 0.37; between about 0.0 and about 0.35; between about 0.0 and about 0.33; between about 0.0 and about 0.31; between about 0.0 and about 0.29; between about 0.0 and about 0.27; between about 0.0 and about 0.25; between about 0.0 and about 0.23; between about 0.0 and about 0.21; between about 0.0 and about 0.19; between about 0.0 and about 0.17; between about 0.0 and about 0.15; between about 0.0 and about 0.13; between about 0.0 and about 0.11; between about 0.0 and about 0.09; between about 0.0 and about 0.07; or between about 0.0 and about 0.05.

[0458] 6. An antibody comprising a CD3 binding domain, wherein said antibody elicits T cell activation or T cell killing while displaying a decreased propensity to elicit cytokine production to levels capable of inducing cytokine release syndrome.

[0459] 7. An antibody comprising a CD3 binding domain, wherein said antibody elicits T cell activation or T cell killing while displaying a decreased propensity to elicit cytokine production to levels capable of inducing cytokine release relative to that observed one or more of: trastuzumab; (Herceptin®); lintuzumab; blinatumomab (Blincyto®); and Mab 364, Mab366, Mab 367, Mab 368, Mab 369, Mab 370, or Mab 22, as provided in Table 2.

[0460] 8. The antibody of Clause 6 or Clause 7, wherein the T cell activation, T cell killing, and/or cytokine production is assessed by performing a cell-based assay.

[0461] 9. The antibody of Clause 8, wherein the T cell activation, T cell killing, and/or cytokine production is assessed by performing a T-cell activation assay, a T cell redirected target cell killing assay, and cytokine production level assay, wherein each assay comprises incubating PBMCs with the antibody.

[0462] 10. The antibody of Clause 9, wherein the T cell redirected target cell killing assay further comprises incubating the PBMCs and the antibody with target cells expressing a target antigen other than CD3.

[0463] 11. The antibody of any one of Clauses 6 through 10, wherein at least one cytokine for which cytokine production levels are measured is selected from the group consisting of: Interleukin 6 (IL-6); Interleukin 12 (IL-12); tumor necrosis factor alpha (TNFa); (TGFb); Interleukin-2 (IL-2); and Interferon gamma (IFNg).

[0464] 12. The antibody of any one of Clauses 6 through 11, wherein IFNg production levels are measured.

[0465] 13. The antibody of any one of Clauses 6 through 13, wherein the cytokine production levels constitute a cytokine release syndrome (CRS) risk profile.

[0466] 14. The antibody of any one of Clauses 6 through 13 wherein the production levels constitute a cytokine release syndrome risk profile that is indicative of decreased risk of eliciting cytokine release syndrome (CRS).

[0467] 15. The antibody of any one of Clauses 6 through 14 wherein the cytokine production levels constitute a cytokine release syndrome risk profile that is indicative of decreased risk of eliciting cytokine release syndrome (CRS) when compared to the cytokine release syndrome risk profile assessed for one or more of: trastuzumab; (Herceptin®); lintuzumab; blinatumomab (Blincyto®); and Mab 364, Mab366, Mab 367, Mab 368, Mab 369, Mab 370, or Mab 22, as provided in Table 2.

[0468] 16. An antibody comprising a CDRH3 that is: 100% identical to; at least 99% identical to; at least 98% identical to; at least 97% identical to; at least 96% identical to; at least 95% identical to; at least 94% identical to; at least 93% identical to; at least 92% identical to; at least 91% identical to; at least 90% identical to; at least 89% identical to; at least 88% identical to; at least 87% identical to; at least 86% identical to; at least 85% identical to; at least 84% identical to; at least 83% identical to; at least 82% identical to; or at least 80% identical to; a CDRH3 selected from the group consisting of the CDRH3s of Mabs 1 through 21, 23 through 222, 224 through 363, and 371 through 405 as provided in Table 2; with the proviso that the CDRH3 is not 100% identical to the CDRH3 of any of Mabs 223, 364, 365, 366, 367, 368, 369, or 370 as provided in Table 2.

[0469] 17. An antibody comprising a CDRH2 that is: 100% identical to; at least 99% identical to; at least 98% identical to; at least 97% identical to; at least 96% identical to; at least 95% identical to; at least 94% identical to; at least 93% identical to; at least 92% identical to; at least 91% identical to; at least 90% identical to; at least 89% identical to; at least 88% identical to; at least 87% identical to; at least 86% identical to; at least 85% identical to; at least 84% identical to; at least 83% identical to; at least 82% identical to; or at least 80% identical to; a CDRH2 selected from the group consisting of the CDRH2s of Mabs 1 through 21, 23 through 222, 224 through 363, and 371 through 405 as provided in Table 2; with the proviso that the CDRH2 is not 100% identical to the CDRH2 of any of Mabs 223, 364, 365, 366, 367, 368, 369, or 370 as provided in Table 2.

[0470] 18. An antibody comprising a CDRH1 that is: 100% identical to; at least 99% identical to; at least 98% identical to; at least 97% identical to; at least 96% identical to; at least 95% identical to; at least 94% identical to; at least 93% identical to; at least 92% identical to; at least 91% identical to; at least 90% identical to; at least 89% identical to; at least 88% identical to; at least 87% identical to; at least 86% identical to; at least 85% identical to; at least 84% identical to; at least 83% identical to; at least 82% identical to; or at least 80% identical to; a CDRH1 selected from the group consisting of the CDRH1s of Mabs 1 through 21, 23 through 222, 224 through 363, and 371 through 405 as provided in Table 2; with the proviso that the CDRH1 is not 100% identical to the CDRH1 of any of Mabs 223, 364, 365, 366, 367, 368, 369, or 370 as provided in Table 2.

[0471] 19. An antibody comprising a CDRL3 that is: 100% identical to; at least 99% identical to; at least 98% identical to; at least 97% identical to; at least 96% identical to; at least 95% identical to; at least 94% identical to; at least 93% identical to; at least 92% identical to; at least 91% identical to; at least 90% identical to; at least 89% identical to; at least 88% identical to; at least 87% identical to; at least 86% identical to; at least 85% identical to; at least 84% identical to; at least 83% identical to; at least 82% identical to; or at least 80% identical to; a CDRL3 selected from the group consisting of the CDRL3s of Mabs 1 through 21, 23 through 222, 224 through 363, and 371 through 405 as provided in Table 2; with the proviso that the CDRL3 is not 100% identical to the CDRL3 of any of Mabs 223, 364, 365, 366, 367, 368, 369, or 370 as provided in Table 2.

[0472] 20. An antibody comprising a CDRL2 that is: 100% identical to; at least 99% identical to; at least 98% identical to; at least 97% identical to; at least 96% identical to; at least 95% identical to; at least 94% identical to; at least 93% identical to; at least 92% identical to; at least 91% identical to; at least 90% identical to; at least 89% identical to; at least 88% identical to; at least 87% identical to; at least 86% identical to; at least 85% identical to; at least 84% identical to; at least 83% identical to; at least 82% identical to; or at least 80% identical to; a CDRL2 selected from the group consisting of the CDRL2s of Mabs 1 through 21, 23 through 222, 224 through 363, and 371 through 405 as provided in Table 2; with the proviso that the CDRL2 is not 100% identical to the CDRL2 of any of Mabs 223, 364, 365, 366, 367, 368, 369, or 370 as provided in Table 2.

[0473] 21. An antibody comprising a CDRL1 that is: 100% identical to; at least 99% identical to; at least 98% identical to; at least 97% identical to; at least 96% identical to; at least 95% identical to; at least 94% identical to; at least 93% identical to; at least 92% identical to; at least 91% identical to; at least 90% identical to; at least 89% identical to; at least 88% identical to; at least 87% identical to; at least 86% identical to; at least 85% identical to; at least 84% identical to; at least 83% identical to; at least 82% identical to; or at least 80% identical to; a CDRL1 selected from the group consisting of the CDRL1s ofMabs 1 through 21, 23 through 222, 224 through 363, and 371 through 405 as provided in Table 2; with the proviso that the CDRL1 is not 100% identical to the CDRL1 of any of Mabs 223, 364, 365, 366, 367, 368, 369, or 370 as provided in Table 2.

[0474] 22. An antibody comprising a heavy chain (HC) that is: 100% identical to; at least 99% identical to; at least 98% identical to; at least 97% identical to; at least 96% identical to; at least 95% identical to; at least 94% identical to; at least 93% identical to; at least 92% identical to; at least 91% identical to; at least 90% identical to; at least 89% identical to; at least 88% identical to; at least 87% identical to; at least 86% identical to; at least 85% identical to; at least 84% identical to; at least 83% identical to; at least 82% identical to; or at least 80% identical to; an HC selected from the group consisting of the HCs of Mabs 1 through 21, 23 through 222, 224 through 363, and 371 through 405 as provided in Table 2; with the proviso that the HC is not 100% identical to the HC of any of Mabs 223, 364, 365, 366, 367, 368, 369, or 370 as provided in Table 2.

[0475] 23. An antibody comprising a light chain (LC) that is: 100% identical to; at least 99% identical to; at least 98% identical to; at least 97% identical to; at least 96% identical to; at least 95% identical to; at least 94% identical to; at least 93% identical to; at least 92% identical to; at least 91% identical to; at least 90% identical to; at least 89% identical to; at least 88% identical to; at least 87% identical to; at least 86% identical to; at least 85% identical to; at least 84% identical to; at least 83% identical to; at least 82% identical to; or at least 80% identical to; an LC selected from the group consisting of the LCs of Mabs 1 through 21, 23 through 222, 224 through 363, and 371 through 405 as provided in Table 2; with the proviso that the LC is not 100% identical to the LC of any of Mabs 223, 364, 365, 366, 367, 368, 369, or 370 as provided in Table 2. 24. An antibody comprising:

[0476] A) a CDRH3 that is: 100% identical to; at least 99% identical to; at least 98% identical to; at least 97% identical to; at least 96% identical to; at least 95% identical to; at least 94% identical to; at least 93% identical to; at least 92% identical to; at least 91% identical to; at least 90% identical to; at least 89% identical to; at least 88% identical to; at least 87% identical to; at least 86% identical to; at least 85% identical to; at least 84% identical to; at least 83% identical to; at least 82% identical to; or at least 80% identical to; a CDRH3 selected from the group consisting of the CDRH3s of Mabs 1 through 21, 23 through 222, 224 through 363, and 371 through 405 as provided in Table 2;

[0477] B) a CDRH2 that is: 100% identical to; at least 99% identical to; at least 98% identical to; at least 97% identical to; at least 96% identical to; at least 95% identical to; at least 94% identical to; at least 93% identical to; at least 92% identical to; at least 91% identical to; at least 90% identical to; at least 89% identical to; at least 88% identical to; at least 87% identical to; at least 86% identical to; at least 85% identical to; at least 84% identical to; at least 83% identical to; at least 82% identical to; or at least 80% identical to; a CDRH2 selected from the group consisting of the CDRH2s of Mabs 1 through 21, 23 through 222, 224 through 363, and 371 through 405 as provided in Table 2; and

[0478] C) a CDRH1 that is: 100% identical to; at least 99% identical to; at least 98% identical to; at least 97% identical to; at least 96% identical to; at least 95% identical to; at least 94% identical to; at least 93% identical to; at least 92% identical to; at least 91% identical to; at least 90% identical to; at least 89% identical to; at least 88% identical to; at least 87% identical to; at least 86% identical to; at least 85% identical to; at least 84% identical to; at least 83% identical to; at least 82% identical to; or at least 80% identical to; a CDRH1 selected from the group consisting of the CDRH1s of Mabs 1 through 21, 23 through 222, 224 through 363, and 371 through 405 as provided in Table 2; with the proviso that the neither the CDRH3, CDRH2, nor the CHRH1 is 100% identical to the CHRH3, CDRH2, or CDRH1, respectively, of any of Mabs 223, 364, 365, 366, 367, 368, 369, or 370 as provided in Table 2.

[0479] 25. An antibody comprising:

[0480] A) a CDRL3 that is: 100% identical to; at least 99% identical to; at least 98% identical to; at least 97% identical to; at least 96% identical to; at least 95% identical to; at least 94% identical to; at least 93% identical to; at least 92% identical to; at least 91% identical to; at least 90% identical to; at least 89% identical to; at least 88% identical to; at least 87% identical to; at least 86% identical to; at least 85% identical to; at least 84% identical to; at least 83% identical to; at least 82% identical to; or at least 80% identical to; a CDRL3 selected from the group consisting of the CDRL3s of Mabs 1 through 21, 23 through 222, 224 through 363, and 371 through 405 as provided in Table 2;

[0481] B) a CDRL2 that is: 100% identical to; at least 99% identical to; at least 98% identical to; at least 97% identical to; at least 96% identical to; at least 95% identical to; at least 94% identical to; at least 93% identical to; at least 92% identical to; at least 91% identical to; at least 90% identical to; at least 89% identical to; at least 88% identical to; at least 87% identical to; at least 86% identical to; at least 85% identical to; at least 84% identical to; at least 83% identical to; at least 82% identical to; or at least 80% identical to; a CDRL2 selected from the group consisting of the CDRL2s of Mabs 1 through 21, 23 through 222, 224 through 363, and 371 through 405 as provided in Table 2; and

[0482] C) a CDRL1 that is: 100% identical to; at least 99% identical to; at least 98% identical to; at least 97% identical to; at least 96% identical to; at least 95% identical to; at least 94% identical to; at least 93% identical to; at least 92% identical to; at least 91% identical to; at least 90% identical to; at least 89% identical to; at least 88% identical to; at least 87% identical to; at least 86% identical to; at least 85% identical to; at least 84% identical to; at least 83% identical to; at least 82% identical to; or at least 80% identical to; a CDRL1 selected from the group consisting of the CDRL1s of Mabs 1 through 21, 23 through 222, 224 through 363, and 371 through 405 as provided in Table 2;

with the proviso that the neither the CDRL3, CDRL2, nor the CHRL1 is 100% identical to the CHRL3, CDRL2, or CDRL1, respectively, of any of Mabs 223, 364, 365, 366, 367, 368, 369, or 370 as provided in Table 2.

[0483] 26. An antibody comprising:

[0484] A) a CDRH3 that is: 100% identical to; at least 99% identical to; at least 98% identical to; at least 97% identical to; at least 96% identical to; at least 95% identical to; at least 94% identical to; at least 93% identical to; at least 92% identical to; at least 91% identical to; at least 90% identical to; at least 89% identical to; at least 88% identical to; at least 87% identical to; at least 86% identical to; at least 85% identical to; at least 84% identical to; at least 83% identical to; at least 82% identical to; or at least 80% identical to; a CDRH3 selected from the group consisting of the CDRH3s of Mabs 1 through 21, 23 through 222, 224 through 363, and 371 through 405 as provided in Table 2;

[0485] B) a CDRH2 that is: 100% identical to; at least 99% identical to; at least 98% identical to; at least 97% identical to; at least 96% identical to; at least 95% identical to; at least 94% identical to; at least 93% identical to; at least 92% identical to; at least 91% identical to; at least 90% identical to; at least 89% identical to; at least 88% identical to; at least 87% identical to; at least 86% identical to; at least 85% identical to; at least 84% identical to; at least 83% identical to; at least 82% identical to; or at least 80% identical to; a CDRH2 selected from the group consisting of the CDRH2s of Mabs 1 through 21, 23 through 222, 224 through 363, and 371 through 405 as provided in Table 2;

[0486] C) a CDRH1 that is: 100% identical to; at least 99% identical to; at least 98% identical to; at least 97% identical to; at least 96% identical to; at least 95% identical to; at least 94% identical to; at least 93% identical to; at least 92% identical to; at least 91% identical to; at least 90% identical to; at least 89% identical to; at least 88% identical to; at least 87% identical to; at least 86% identical to; at least 85% identical to; at least 84% identical to; at least 83% identical to; at least 82% identical to; or at least 80% identical to; a CDRH1 selected from the group consisting of the CDRH1s of Mabs 1 through 21, 23 through 222, 224 through 363, and 371 through 405 as provided in Table 2;

[0487] D) a CDRL3 that is: 100% identical to; at least 99% identical to; at least 98% identical to; at least 97% identical to; at least 96% identical to; at least 95% identical to; at least 94% identical to; at least 93% identical to; at least 92% identical to; at least 91% identical to; at least 90% identical to; at least 89% identical to; at least 88% identical to; at least 87% identical to; at least 86% identical to; at least 85% identical to; at least 84% identical to; at least 83% identical to; at least 82% identical to; or at least 80% identical to; a CDRL3 selected from the group consisting of the CDRL3s of Mabs 1 through 21, 23 through 222, 224 through 363, and 371 through 405 as provided in Table 2;

[0488] E) a CDRL2 that is: 100% identical to; at least 99% identical to; at least 98% identical to; at least 97% identical to; at least 96% identical to; at least 95% identical to; at least 94% identical to; at least 93% identical to; at least 92% identical to; at least 91% identical to; at least 90% identical to; at least 89% identical to; at least 88% identical to; at least 87% identical to; at least 86% identical to; at least 85% identical to; at least 84% identical to; at least 83% identical to; at least 82% identical to; or at least 80% identical to; a CDRL2 selected from the group consisting of the CDRL2s of Mabs 1 through 21, 23 through 222, 224 through 363, and 371 through 405 as provided in Table 2; and

[0489] F) a CDRL1 that is: 100% identical to; at least 99% identical to; at least 98% identical to; at least 97% identical to; at least 96% identical to; at least 95% identical to; at least 94% identical to; at least 93% identical to; at least 92% identical to; at least 91% identical to; at least 90% identical to; at least 89% identical to; at least 88% identical to; at least 87% identical to; at least 86% identical to; at least 85% identical to; at least 84% identical to; at least 83% identical to; at least 82% identical to; or at least 80% identical to; a CDRL1 selected from the group consisting of the CDRL1s of Mabs 1 through 21, 23 through 222, 224 through 363, and 371 through 405 as provided in Table 2;

[0490] with the proviso that the neither the CDRH3, CDRH2, CDRH1, CDRL3, CDHL2, nor the CHRL1 is 100% identical to the CHRH3, CDRH2, CDRH1, CDRL3, CDHL2, or the CDRL1, respectively, of any of Mabs 223, 364, 365, 366, 367, 368, 369, or 370 as provided in Table 2.

[0491] 27. An antibody according to any one of Clauses 16 through 26, wherein the antibody comprises an anti-cluster of differentiation three (CD3) binding domain.

[0492] 28. An antibody according to any one of Clauses 16 through 27, wherein the antibody comprises an anti-cluster of differentiation three (CD3) binding domain that is selected from the group consisting of: the CD3 binding domains of ADI-15512; ADI-15516; and ADI-16513; as provided in Table 2.

[0493] 29. An antibody according to any one of Clauses 16 through 27, wherein the antibody comprises an anti-cluster of differentiation three (CD3) binding domain that is selected from the group consisting of: the CD3 binding domains of ADI-18562; ADI-18564; ADI-18565; ADI-18566; ADI-18567; ADI-18568; ADI-18570; ADI-18571; ADI-18572; ADI-18573; ADI-18563; ADI-18569; ADI-18574; ADI-18575; ADI-18576; ADI-18578; ADI-18579; ADI-18580; ADI-18581; ADI-18582; ADI-18584; ADI-18585; ADI-18577; ADI-18583; ADI-18588; ADI-18589; ADI-18590; ADI-18591; ADI-18593; ADI-18594; ADI-18595; ADI-18596; ADI-18597; ADI-18592; ADI-18587; ADI-18586; and; ADI-16606; as provided in Table 2.

[0494] 30. An antibody according to any one of Clauses 16 through 27, wherein the antibody comprises an anti-cluster of differentiation three (CD3) binding domain that is selected from the group consisting of: the CD3 binding domains of ADI-18576; ADI-20820; ADI-20578; ADI-20571; ADI-21097; ADI-20577; ADI-20576; ADI-20568; ADI-20582; ADI-20575; ADI-20567; ADI-20574; ADI-20573; ADI-20579; ADI-18565; ADI-20818; ADI-20587; ADI-20588; ADI-20589; ADI-20590; ADI-20594; ADI-20596; ADI-20599; ADI-20605; ADI-20607; ADI-20608; and ADI-20609; as provided in Table 2.

[0495] 31. An antibody according to any one of Clauses 16 through 27, wherein the antibody comprises an anti-cluster of differentiation three (CD3) binding domain that is selected from the group consisting of: the CD3 binding domains of ADI-16606; ADI-20587; ADI-20607; ADI-20590; ADI-28708; ADI-28709; ADI-28710; ADI-21943; ADI-28711; ADI-28712; ADI-28713; ADI-28714; ADI-28715; ADI-21944; ADI-28716; ADI-21945; ADI-21946; ADI-28717; ADI-21947; ADI-28718; ADI-28719; ADI-28720; ADI-28721; ADI-28722; ADI-28723; ADI-28724; ADI-28725; ADI-28726; ADI-28727; ADI-28728; ADI-28729; ADI-28730; ADI-28731; ADI-28732; ADI-28733; ADI-28734; ADI-28735; ADI-28736; ADI-28737; ADI-28738; ADI-28739; ADI-28740; ADI-28741; ADI-28742; ADI-28743; ADI-21948; ADI-21949; ADI-28744; ADI-21950; ADI-28745; ADI-28746; ADI-28747; ADI-28748; ADI-21951; ADI-21952; ADI-28749; ADI-28750; ADI-28751; ADI-21953; ADI-28752; ADI-21954; ADI-28753; ADI-28754; ADI-28755; ADI-28756; ADI-28757; ADI-28758; ADI-28759; ADI-28760; ADI-28761; ADI-28762; ADI-28763; ADI-28764; ADI-28765; ADI-28766; ADI-28767; ADI-28768; ADI-21955; ADI-28769; ADI-28770; ADI-21956; ADI-28771; ADI-28772; ADI-28773; ADI-28774; and ADI-28775; as provided in Table 2.

[0496] 32. An antibody according to any one of Clauses 16 through 27, wherein the antibody comprises an anti-cluster of differentiation three (CD3) binding domain that is selected from the group consisting of: the CD3 binding domains of ADI-21959; ADI-21963; ADI-21965; ADI-21967; ADI-21970; ADI-21971; ADI-21972; ADI-21973; ADI-21974; ADI-21975; ADI-21976; ADI-21977; ADI-21978; ADI-21979; ADI-21943; ADI-21944; ADI-21945; ADI-21946; ADI-21947; ADI-21948; ADI-21949; ADI-21950; ADI-21951; ADI-21952; ADI-21953; ADI-21954; ADI-21955; and ADI-21956; as provided in Table 2.

[0497] 33. An antibody according to any one of Clauses 16 through 27, wherein the antibody comprises an anti-cluster of differentiation three (CD3) binding domain that is selected from the group consisting of: the CD3 binding domains of ADI-21952; ADI-22523; ADI-24403; ADI-24404; ADI-24405; ADI-24407; ADI-24408; ADI-24409; ADI-24410; ADI-24411; ADI-24412; ADI-24413; ADI-24414; ADI-24415; ADI-24416; ADI-24417; ADI-24418; ADI-24434; ADI-24435; ADI-24436; ADI-24437; ADI-24438; ADI-24439; ADI-24440; ADI-24441; ADI-24442; ADI-24443; ADI-24444; ADI-24445; ADI-24446; ADI-24449; ADI-24388; ADI-24389; ADI-24390; ADI-24391; ADI-24392; ADI-24393; ADI-24394; ADI-24395; ADI-24396; ADI-24397; ADI-24398; ADI-24399; ADI-24400; ADI-24401; ADI-24402; ADI-24419; ADI-24420; ADI-24421; ADI-24422; ADI-24423; ADI-24424; ADI-24425; ADI-24426; ADI-24427; ADI-24428; ADI-24429; ADI-24430; ADI-24431; ADI-24432; ADI-24433; ADI-24447; and ADI-24448; as provided in Table 2.

[0498] 34. An antibody according to any one of Clauses 16 through 27, wherein the antibody comprises an anti-cluster of differentiation three (CD3) binding domain that is selected from the group consisting of: the CD3 binding domains of ADI-22523; ADI-23652; ADI-23653; ADI-23654; ADI-23655; ADI-23656; ADI-23657; ADI-23658; ADI-23651; ADI-23644; ADI-23645; ADI-23646; ADI-23647; ADI-23648; ADI-23649; ADI-23650; ADI-23667; ADI-23668; ADI-23669; ADI-23670; ADI-23671; ADI-23672; ADI-23673; ADI-23659; ADI-23660; ADI-23661; ADI-23663; ADI-23664; ADI-23639; ADI-23641; ADI-23642; ADI-23640; ADI-23643; ADI-21952; ADI-23633; ADI-23634; ADI-23635; ADI-23636; ADI-23637; ADI-23638; ADI-23632; and ADI-23629; as provided in Table 2.

[0499] 35. An antibody according to any one of Clauses 16 through 27, wherein the antibody comprises an anti-cluster of differentiation three (CD3) binding domain that is selected from the group consisting of: the CD3 binding domains of ADI-22523; ADI-26906; ADI-26907; ADI-26908; ADI-26909; ADI-26910; ADI-26912; ADI-26913; ADI-26915; ADI-26916; ADI-26917; ADI-26918; ADI-26919; ADI-26920; ADI-26921; ADI-26924; ADI-26925; ADI-26927; ADI-26928; ADI-26929; ADI-26930; ADI-26932; ADI-26933; ADI-26938; ADI-26939; ADI-26940; ADI-26941; ADI-26942; ADI-26943; ADI-26944; ADI-26945; ADI-26950; ADI-26954; ADI-23672; ADI-23673; ADI-23664; ADI-26955; ADI-26956; ADI-26957; ADI-26958; ADI-26959; ADI-26960; ADI-26962; ADI-26963; ADI-26964; ADI-26965; ADI-26966; ADI-26968; ADI-26969; ADI-26971; ADI-26972; ADI-26973; ADI-26974; ADI-26975; ADI-26976; ADI-26977; ADI-26978; ADI-26979; ADI-26980; ADI-26981; ADI-26982; ADI-26983; ADI-26984; ADI-26985; ADI-26986; ADI-26987; ADI-26988; ADI-26989; ADI-26990; ADI-26991; ADI-26992; ADI-26993; ADI-26994; and ADI-26995; as provided in Table 2.

[0500] 36. An antibody according to any one of Clauses 16 through 27, wherein the antibody comprises an anti-cluster of differentiation three (CD3) binding domain that is selected from the group consisting of: the CD3 binding domains of ADI-22523; ADI-26906; ADI-26907; ADI-26908; ADI-26910; ADI-26913; ADI-26915; ADI-26919; ADI-26920; ADI-26921; 0J ADI-26943; ADI-26954; ADI-21952; ADI-26955; ADI-26956; ADI-26962; ADI-26978; ADI-26983; and ADI-26994; as provided in Table 2.

[0501] 37. An antibody according to any one of Clauses 16 through 27, wherein the antibody comprises an anti-cluster of differentiation three (CD3) binding domain that is selected from the group consisting of: ADI-15512; ADI-16513; ADI-15516; ADI-18565; ADI-18589; ADI-18585; ADI-18590; ADI-18576; ADI-20568; ADI-20580; ADI-21978; ADI-22523; ADI-25133; and ADI-26906.

[0502] 38. An antibody according to any one of Clauses 16 through 27, wherein the antibody comprises an anti-cluster of differentiation three (CD3) binding domain that is selected from the group consisting of: ADI-16606; ADI-29601; ADI-29602; ADI-29603; ADI-20587; ADI-20607; ADI-20590; ADI-21952; ADI-23633; ADI-26955; ADI-26956; ADI-26957; ADI-26958; ADI-26959; ADI-26960; ADI-26961; ADI-26962; ADI-26963; ADI-26964; ADI-26965; ADI-26966; ADI-26967; ADI-26968; ADI-26969; ADI-26970; ADI-26971; ADI-26972; ADI-26973; ADI-26974; ADI-26975; ADI-26976; ADI-26977; ADI-26978; ADI-26979; ADI-26980; ADI-26981; ADI-26982; ADI-26983; ADI-26984; ADI-26985; ADI-26986; ADI-26987; ADI-26988; ADI-26989; ADI-26990; ADI-26991; ADI-26992; ADI-26993; and ADI-26994.

[0503] 39. An antibody comprising an anti-cluster of differentiation three (CD3) binding domain, wherein said CD3 binding domain is selected from the group consisting of: the CD3 binding domains of ADI-15512; ADI-15516; and ADI-16513; as provided in Table 2.

[0504] 40. An antibody comprising an anti-cluster of differentiation three (CD3) binding domain, wherein said CD3 binding domain is selected from the group consisting of: the CD3 binding domains of ADI-18562; ADI-18564; ADI-18565; ADI-18566; ADI-18567; ADI-18568; ADI-18570; ADI-18571; ADI-18572; ADI-18573; ADI-18563; ADI-18569; ADI-18574; ADI-18575; ADI-18576; ADI-18578; ADI-18579; ADI-18580; ADI-18581; ADI-18582; ADI-18584; ADI-18585; ADI-18577; ADI-18583; ADI-18588; ADI-18589; ADI-18590; ADI-18591; ADI-18593; ADI-18594; ADI-18595; ADI-18596; ADI-18597; ADI-18592; ADI-18587; ADI-18586; and; ADI-16606; as provided in Table 2.

[0505] 41. An antibody comprising an anti-cluster of differentiation three (CD3) binding domain, wherein said CD3 binding domain is selected from the group consisting of: the CD3 binding domains of ADI-18576; ADI-20820; ADI-20578; ADI-20571; ADI-21097; ADI-20577; ADI-20576; ADI-20568; ADI-20582; ADI-20575; ADI-20567; ADI-20574; ADI-20573; ADI-20579; ADI-18565; ADI-20818; ADI-20587; ADI-20588; ADI-20589; ADI-20590; ADI-20594; ADI-20596; ADI-20599; ADI-20605; ADI-20607; ADI-20608; and ADI-20609; as provided in Table 2.

[0506] 42. An antibody comprising an anti-cluster of differentiation three (CD3) binding domain, wherein said CD3 binding domain is selected from the group consisting of: the CD3 binding domains of ADI-16606; ADI-20587; ADI-20607; ADI-20590; ADI-28708; ADI-28709; ADI-28710; ADI-21943; ADI-28711; ADI-28712; ADI-28713; ADI-28714; ADI-28715; ADI-21944; ADI-28716; ADI-21945; ADI-21946; ADI-28717; ADI-21947; ADI-28718; ADI-28719; ADI-28720; ADI-28721; ADI-28722; ADI-28723; ADI-28724; ADI-28725; ADI-28726; ADI-28727; ADI-28728; ADI-28729; ADI-28730; ADI-28731; ADI-28732; ADI-28733; ADI-28734; ADI-28735; ADI-28736; ADI-28737; ADI-28738; ADI-28739; ADI-28740; ADI-28741; ADI-28742; ADI-28743; ADI-21948; ADI-21949; ADI-28744; ADI-21950; ADI-28745; ADI-28746; ADI-28747; ADI-28748; ADI-21951; ADI-21952; ADI-28749; ADI-28750; ADI-28751; ADI-21953; ADI-28752; ADI-21954; ADI-28753; ADI-28754; ADI-28755; ADI-28756; ADI-28757; ADI-28758; ADI-28759; ADI-28760; ADI-28761; ADI-28762; ADI-28763; ADI-28764; ADI-28765; ADI-28766; ADI-28767; ADI-28768; ADI-21955; ADI-28769; ADI-28770; ADI-21956; ADI-28771; ADI-28772; ADI-28773; ADI-28774; and ADI-28775; as provided in Table 2.

[0507] 43. An antibody comprising an anti-cluster of differentiation three (CD3) binding domain, wherein said CD3 binding domain is selected from the group consisting of: the CD3 binding domains of ADI-21959; ADI-21963; ADI-21965; ADI-21967; ADI-21970; ADI-21971; ADI-21972; ADI-21973; ADI-21974; ADI-21975; ADI-21976; ADI-21977; ADI-21978; ADI-21979; ADI-21943; ADI-21944; ADI-21945; ADI-21946; ADI-21947; ADI-21948; ADI-21949; ADI-21950; ADI-21951; ADI-21952; ADI-21953; ADI-21954; ADI-21955; and ADI-21956; as provided in Table 2.

[0508] 44. An antibody comprising an anti-cluster of differentiation three (CD3) binding domain, wherein said CD3 binding domain is selected from the group consisting of: the CD3 binding domains of ADI-21952; ADI-22523; ADI-24403; ADI-24404; ADI-24405; ADI-24407; ADI-24408; ADI-24409; ADI-24410; ADI-24411; ADI-24412; ADI-24413; ADI-24414; ADI-24415; ADI-24416; ADI-24417; ADI-24418; ADI-24434; ADI-24435; ADI-24436; ADI-24437; ADI-24438; ADI-24439; ADI-24440; ADI-24441; ADI-24442; ADI-24443; ADI-24444; ADI-24445; ADI-24446; ADI-24449; ADI-24388; ADI-24389; ADI-24390; ADI-24391; ADI-24392; ADI-24393; ADI-24394; ADI-24395; ADI-24396; ADI-24397; ADI-24398; ADI-24399; ADI-24400; ADI-24401; ADI-24402; ADI-24419; ADI-24420; ADI-24421; ADI-24422; ADI-24423; ADI-24424; ADI-24425; ADI-24426; ADI-24427; ADI-24428; ADI-24429; ADI-24430; ADI-24431; ADI-24432; ADI-24433; ADI-24447; and ADI-24448; as provided in Table 2.

[0509] 45. An antibody comprising an anti-cluster of differentiation three (CD3) binding domain, wherein said CD3 binding domain is selected from the group consisting of: the CD3 binding domains of ADI-22523; ADI-23652; ADI-23653; ADI-23654; ADI-23655; ADI-23656; ADI-23657; ADI-23658; ADI-23651; ADI-23644; ADI-23645; ADI-23646; ADI-23647; ADI-23648; ADI-23649; ADI-23650; ADI-23667; ADI-23668; ADI-23669; ADI-23670; ADI-23671; ADI-23672; ADI-23673; ADI-23659; ADI-23660; ADI-23661; ADI-23663; ADI-23664; ADI-23639; ADI-23641; ADI-23642; ADI-23640; ADI-23643; ADI-21952; ADI-23633; ADI-23634; ADI-23635; ADI-23636; ADI-23637; ADI-23638; ADI-23632; and ADI-23629; as provided in Table 2.

[0510] 46. An antibody comprising an anti-cluster of differentiation three (CD3) binding domain, wherein said CD3 binding domain is selected from the group consisting of: the CD3 binding domains of ADI-22523; ADI-26906; ADI-26907; ADI-26908; ADI-26909; ADI-26910; ADI-26912; ADI-26913; ADI-26915; ADI-26916; ADI-26917; ADI-26918; ADI-26919; ADI-26920; ADI-26921; ADI-26924; ADI-26925; ADI-26927; ADI-26928; ADI-26929; ADI-26930; ADI-26932; ADI-26933; ADI-26938; ADI-26939; ADI-26940; ADI-26941; ADI-26942; ADI-26943; ADI-26944; ADI-26945; ADI-26950; ADI-26954; ADI-23672; ADI-23673; ADI-23664; ADI-26955; ADI-26956; ADI-26957; ADI-26958; ADI-26959; ADI-26960; ADI-26962; ADI-26963; ADI-26964; ADI-26965; ADI-26966; ADI-26968; ADI-26969; ADI-26971; ADI-26972; ADI-26973; ADI-26974; ADI-26975; ADI-26976; ADI-26977; ADI-26978; ADI-26979; ADI-26980; ADI-26981; ADI-26982; ADI-26983; ADI-26984; ADI-26985; ADI-26986; ADI-26987; ADI-26988; ADI-26989; ADI-26990; ADI-26991; ADI-26992; ADI-26993; ADI-26994; and ADI-26995; as provided in Table 2.

[0511] 47. An antibody comprising an anti-cluster of differentiation three (CD3) binding domain, wherein said CD3 binding domain is selected from the group consisting of: the CD3 binding domains of ADI-22523; ADI-26906; ADI-26907; ADI-26908; ADI-26910; ADI-26913; ADI-26915; ADI-26919; ADI-26920; ADI-26921; ADI-26943; ADI-26954; ADI-21952; ADI-26955; ADI-26956; ADI-26962; ADI-26978; ADI-26983; and ADI-26994; as provided in Table 2.

[0512] 48. An antibody comprising an anti-cluster of differentiation three (CD3) binding domain, wherein said CD3 binding domain is selected from the group consisting of: ADI-15512; ADI-16513; ADI-15516; ADI-18565; ADI-18589; ADI-18585; ADI-18590; ADI-18576; ADI-20568; ADI-20580; ADI-21978; ADI-22523; ADI-25133; and ADI-26906.

[0513] 49. An antibody comprising an anti-cluster of differentiation three (CD3) binding domain, wherein said CD3 binding domain is selected from the group consisting of: ADI-16606; ADI-29601; ADI-29602; ADI-29603; ADI-20587; ADI-20607; ADI-20590; ADI-21952; ADI-23633; ADI-26955; ADI-26956; ADI-26957; ADI-26958; ADI-26959; ADI-26960; ADI-26961; ADI-26962; ADI-26963; ADI-26964; ADI-26965; ADI-26966; ADI-26967; ADI-26968; ADI-26969; ADI-26970; ADI-26971; ADI-26972; ADI-26973; ADI-26974; ADI-26975; ADI-26976; ADI-26977; ADI-26978; ADI-26979; ADI-26980; ADI-26981; ADI-26982; ADI-26983; ADI-26984; ADI-26985; ADI-26986; ADI-26987; ADI-26988; ADI-26989; ADI-26990; ADI-26991; ADI-26992; ADI-26993; and ADI-26994.

[0514] 50. An antibody according to any one of Clauses 1 through 49, wherein the antibody displays a decreased propensity for degradation relative to one or more of: trastuzumab; (Herceptin®); lintuzumab; blinatumomab (Blincyto®); and Mab 364, Mab366, Mab 367, Mab 368, Mab 369, Mab 370, or Mab 22, as provided in Table 2.

[0515] 51. An antibody according to any one of Clauses 16 through 49, wherein the antibody displays a decreased CRS risk profile relative to one or more of: trastuzumab; (Herceptin®); lintuzumab; blinatumomab (Blincyto®); and Mab 364, Mab366, Mab 367, Mab 368, Mab 369, Mab 370, or Mab 22, as provided in Table 2.

[0516] 52. An antibody according to any one of Clauses 1 through 51, wherein the antibody comprises a multispecific antibody.

[0517] 53. An antibody according to any one of Clauses 1 through 52, wherein the antibody comprises a bispecific antibody.

[0518] 54. An antibody according to any one of Clauses 1 through 53, wherein the antibody comprises at least a second antigen binding domain that specifically binds to an oncology target; an immune-oncology target; a neurodegenerative disease targets; an autoimmune disorder target; an infectious disease target; a metabolic disease target; a cognitive disorder target; a blood-brain barrier target; or a blood disease target.

[0519] 55. An antibody according to any one of Clauses 1 through 54, wherein the antibody comprises at least a second antigen binding domain that specifically binds to an antigen selected from the group consisting of: 17-IA, 4-1BB, 4Dc, 6-keto-PGFla, 8-iso-PGF2a, 8-oxo-dG, Al Adenosine Receptor, A33, ACE, ACE-2, Activin, Activin A, Activin AB, Activin B, Activin C, Activin RIA, Activin RIA ALK-2, Activin RIB ALK-4, Activin RIIA, Activin RUB, ADAM, ADAM10, ADAM12, ADAM15, ADAM17/TACE, ADAM8, ADAM9, ADAMTS, ADAMTS4, ADAMTS5, Addressins, aFGF, ALCAM, ALK, ALK-1, ALK-7, alpha-1-antitrypsin, alpha-V/beta-1 antagonist, ANG, Ang, APAF-1, APE, APJ, APP, APRIL, AR, ARC, ART, Artemin, anti-Id, ASPARTIC, Atrial natriuretic factor, av/b3 integrin, Axl, b2M, B7-1, B7-2, B7-H, B-lymphocyte Stimulator (BlyS), BACE, BACE-1, Bad, BAFF, BAFF-R, Bag-1, BAK, Bax, BCA-1, BCAM, Bel, BCMA, BDNF, b-ECGF, bFGF, BID, Bik, BIM, BLC, BL-CAM, BLK, BMP, BMP-2 BMP-2a, BMP-3 Osteogenin, BMP-4 BMP-2b, BMP-5, BMP-6 Vgr-1, BMP-7 (OP-1), BMP-8 (BMP-8a, OP-2), BMPR, BMPR-IA (ALK-3), BMPR-IB (ALK-6), BRK-2, RPK-1, BMPR-II (BRK-3), BMPs, b-NGF, BOK, Bombesin, Bone-derived neurotrophic factor, BPDE, BPDE-DNA, BTC, complement factor 3 (C3), C3a, C4, C5, C5a, CIO, CA125, CAD-8, Calcitonin, cAMP, carcinoembryonic antigen (CEA), carcinoma-associated antigen, Cathepsin A, Cathepsin B, Cathepsin C/DPPI, Cathepsin D, Cathepsin E, Cathepsin H, Cathepsin L, Cathepsin O, Cathepsin S, Cathepsin V, Cathepsin X/Z/P, CBL, CCI, CCK2, CCL, CCL1, CCLll, CCL12, CCL13, CCL 14, CCL15, CCL16, CCL1 7, CCL18, CCL19, CCL2, CCL20, CCL21, CCL22, CCL23, CCL24, CCL25, CCL26, CCL27, CCL28, CCL3, CCL4, CCL5, CCL6, CCL7, CCL8, CCL9/10, CCR, CCR1, CCR10, CCR10, CCR2, CCR3, CCR4, CCR5, CCR6, CCR7, CCR8, CCR9, CD1, CD2, CD4, CD5, CD6, CD7, CD8, CD10, CDlla, CDllb, CDllc, CD13, CD14, CD15, CD16, CD18, CD19, CD20, CD21, CD22, CD23, CD25, CD27L, CD28, CD29, CD30, CD30L, CD32, CD33 (p67 proteins), CD34, CD38, CD40, CD40L, CD44, CD45, CD46, CD49a, CD52, CD54, CD55, CD56, CD61, CD64, CD66e, CD74, CD80 (B7-1), CD89, CD95, CD123, CD137, CD138, CD140a, CD146, CD147, CD148, CD152, CD164, CEACAMS, CFTR, cGMP, CINC, Clostridium botulinum toxin, Clostridium perfringens toxin, CKb8-1, CLC, CMV, CMV UL, CNTF, CNTN-1, COX, C-Ret, CRG-2, CT-1, CTACK, CTGF, CTLA-4, CX3CL1, CX3CR1, CXCL, CXCL1, CXCL2, CXCL3, CXCL4, CXCL5, CXCL6, CXCL7, CXCL8, CXCL9, CXCL10, CXCL11, CXCL12, CXCL13, CXCL14, CXCL15, CXCL16, CXCR, CXCR1, CXCR2, CXCR3, CXCR4, CXCR5, CXCR6, cytokeratin tumor-associated antigen, DAN, DCC, DcR3, DC-SIGN, Decay accelerating factor, des(1-3)-IGF-I (brain IGF-1), Dhh, digoxin, DNAM-1, Dnase, Dpp, DPPIV/CD26, Dtk, ECAD, EDA, EDA-A1, EDA-A2, EDAR, EGF, EGFR (ErbB-1), EMA, EMMPRIN, EN A, endothelin receptor, Enkephalinase, eNOS, Eot, eotaxinl, EpCAM, Ephrin B2/EphB4, EPO, ERCC, E-selectin, ET-1, Factor Ila, Factor VII, Factor VIIIc, Factor IX, fibroblast activation protein (FAP), Fas, FcR1, FEN-1, Ferritin, FGF, FGF-19, FGF-2, FGF3, FGF-8, FGFR, FGFR-3, Fibrin, FL, FLIP, Flt-3, Flt-4, Follicle stimulating hormone, Fractalkine, FZD1, FZD2, FZD3, FZD4, FZD5, FZD6, FZD7, FZD8, FZD9, FZD10, G250, Gas 6, GCP-2, GCSF, GD2, GD3, GDF, GDF-1, GDF-3 (Vgr-2), GDF-5 (BMP-14, CDMP-1), GDF-6 (BMP-13, CDMP-2), GDF-7 (BMP-12, CDMP-3), GDF-8 (Myostatin), GDF-9, GDF-15 (MIC-1), GDNF, GFAP, GFRa-1, GFR-alphal, GFR-alpha2, GFR-alpha3, GITR, Glucagon, Glut 4, glycoprotein Ilb/IIIa (GP Ilb/IIIa), GM-CSF, gp130, gp72, GRO, Growth hormone releasing factor, Hapten (NP-cap or NIP-cap), HB-EGF, HCC, HCMV gB envelope glycoprotein, HCMV) gH envelope glycoprotein, HCMV UL, Hemopoietic growth factor (HGF), Hep B gp120, heparanase, Her2, Her2/neu (ErbB-2), Her3 (ErbB-3), Her4 (ErbB-4), herpes simplex virus (HSV) gB glycoprotein, HSV gD glycoprotein, HGFA, High molecular weight melanoma-associated antigen (HMW-MAA), HIV gp120, HIV IIIB gp 120 V3 loop, HLA, HLA-DR, HM1.24, HMFG PEM, HRG, Hrk, human cardiac myosin, human cytomegalovirus (HCMV), human growth hormone (HGH), HVEM, 1-309, IAP, ICAM, ICAM-1, ICAM-3, ICE, ICOS, IFNg, Ig, IgA receptor, IgE, IGF, IGF binding proteins, IGF-1R, IGFBP, IGF-I, IGF-II, IL, IL-1, IL-1R, IL-2, IL-2R, IL-4, IL-4R, IL-5, IL-5R, IL-6, IL-6R, IL-8, IL-9, IL-10, IL-12, IL-13, IL-15, IL-18, IL-18R, IL-23, interferon (INF)-alpha, INF-beta, INF-gamma, Inhibin, iNOS, Insulin A-chain, Insulin B-chain, Insulin-like growth factor 1, integrin alpha2, integrin alpha3, integrin alpha4, integrin alpha4/betal, integrin, alpha4/beta7, integrin alpha5 (alphaV), integrin alpha5/betal, integrin alpha5/beta3, integrin alpha6, integrin betal, integrin beta2, interferon gamma, IP-10, 1-TAC, JE, Kallikrein 2, Kallikrein 5, Kallikrein 6, Kallikrein 11, Kallikrein 12, Kallikrein 14, Kallikrein 15, Kallikrein LI, Kallikrein L2, Kallikrein L3, Kallikrein L4, KC, KDR, Keratinocyte Growth Factor (KGF), laminin 5, LAMP, LAP, LAP (TGF-1), Latent TGF-1, Latent TGF-1 bpl, LBP, LDGF, LECT2, Lefty, Lewis-Y antigen, Lewis-Y related antigen, LFA-1, LFA-3, Lfo, LIF, LIGHT, lipoproteins, LIX, LKN, Lptn, L-Selectin, LT-a, LT-b, LTB4, LTBP-1, Lung surfactant, Luteinizing hormone, Lymphotoxin Beta Receptor, Mac-1, MAdCAM, MAG, MAP2, MARC, MCAM, MCAM, MCK-2, MCP, M-CSF, MDC, Mer, METALLOPROTEASES, MGDF receptor, MGMT, MHC (HLA-DR), MIF, MIG, MIP, MIP-1-alpha, MK, MMAC1, MMP, MMP-1, MMP-10, MMP-11, MMP-12, MMP-13, MMP-14, MMP-15, MMP-2, MMP-24, MMP-3, MMP-7, MMP-8, MMP-9, MPIF, Mpo, MSK, MSP, mucin (Mucl), MUC18, Muellerian-inhibiting substance, Mug, MuSK, NAIP, NAP, NCAD, N-Cadherin, NCA 90, NCAM, NCAM, Neprilysin, Neurotrophin-3,-4, or -6, Neurturin, Neuronal growth factor (NGF), NGFR, NGF-beta, nNOS, NO, NOS, Npn, NRG-3, NT, NTN, OB, OGG1, OPG, OPN, OSM, OX40L, OX40R, p150, p95, PADPr, Parathyroid hormone, PARC, PARP, PBR, PBSF, PCAD, P-Cadherin, PCNA, PDGF, PDGF, PDK-1, PECAM, PEM, PF4, PGE, PGF, PGI2, PGJ2, PIN, PLA2, placental alkaline phosphatase (PLAP), P1GF, PLP, PP14, Proinsulin, Prorelaxin, Protein C, PS, PSA, PSCA, prostate specific membrane antigen (PSMA), PTEN, PTHrp, Ptk, PTN, R51, RANK, RANKL, RANTES, Relaxin A-chain, Relaxin B-chain, renin, respiratory syncytial virus (RSV) F, RSV Fgp, Ret, Rheumatoid factors, RLIP76, RPA2, RSK, S100, SCF/KL, SDF-1, SERINE, Serum albumin, sFRP-3, Shh, SIGIRR, SK-1, SLAM, SLPI, SMAC, SMDF, SMOH, SOD, SPARC, Stat, STEAP, STEAP-II, TACE, TACI, TAG-72 (tumor-associated glycoprotein-72), TARC, TCA-3, T-cell receptors (e.g., T-cell receptor alpha/beta), TdT, TECK, TEM1, TEM5, TEM7, TEM8, TERT, testicular PLAP-like alkaline phosphatase, TfR, TGF, TGF-alpha, TGF-beta, TGF-beta Pan Specific, TGF-beta RI (ALK-5), TGF-beta RII, TGF-beta Rllb, TGF-beta RIII, TGF-betal, TGF-beta2, TGF-beta3, TGF-beta4, TGF-beta5, Thrombin, Thymus Ck-1, Thyroid stimulating hormone, Tie, TIMP, TIQ, Tissue Factor, TMEFF2, Tmpo, TMPRSS2, TNF, TNF-alpha, TNF-alpha beta, TNF-beta2, TNFc, TNF-RI, TNF-RII, TNFRSF10A (TRAIL R1 Apo-2, DR4), TNFRSFIOB (TRAIL R2 DR5, KILLER, TRICK-2A, TRICK-B), TNFRSF10C (TRAIL R3 DcR1, LIT, TRID), TNFRSF10D (TRAIL R4 DcR2, TRUNDD), TNFRSF11A (RANK ODF R, TRANCE R), TNFRSFllB (OPG OCIF, TR1), TNFRSF12 (TWEAK R FN14), TNFRSF13B (TACI), TNFRSF13C (BAFF R), TNFRSF14 (HVEM ATAR, HveA, LIGHT R, TR2), TNFRSF16 (NGFR p75NTR), TNFRSF17 (BCMA), TNFRSF18 (GITR AITR), TNFRSF19 (TROY TAJ, TRADE), TNFRSF19L (RELT), TNFRSFIA (TNF RI CD120a, p55-60), TNFRSFIB (TNF RII CD120b, p75-80), TNFRSF26 (TNFRH3), TNFRSF3 (LTbR TNF RIII, TNFC R), TNFRSF4 (OX40 ACT35, TXGP1 R), TNFRSF5 (CD40 p50), TNFRSF6 (Fas Apo-1, APT1, CD95), TNFRSF6B (DcR3 M68, TR6), TNFRSF7 (CD27), TNFRSF8 (CD30), TNFRSF9 (4-1BB CD137, ILA), TNFRSF21 (DR6), TNFRSF22 (DcTRAIL R2 TNFRH2), TNFRST23 (DcTRAIL RI TNFRH1), TNFRSF25 (DR3 Apo-3, LARD, TR-3, TRAMP, WSL-1), TNFSF10 (TRAIL Apo-2 Ligand, TL2), TNFSF11 (TRANCE/RANK Ligand ODF, OPG Ligand), TNFSF12 (TWEAK Apo-3 Ligand, DR3 Ligand), TNFSF13 (APRIL TALL2), TNFSF13B (BAFF BLYS, TALL1, THANK, TNFSF20), TNFSF14 (LIGHT HVEM Ligand, LTg), TNFSF15 (TL1A/VEGI), TNFSF18 (GITR Ligand AITR Ligand, TL6), TNFSFIA (TNF-α Conectin, DIF, TNFSF2), TNFSF1B (TNF-b LTa, TNFSF1), TNFSF3 (LTb TNFC, p33), TNFSF4 (OX40 Ligand gp34, TXGP1), TNFSF5 (CD40 Ligand CD154, gp39, HIGM1, IMD3, TRAP), TNFSF6 (Fas Ligand Apo-1 Ligand, APT1 Ligand), TNFSF7 (CD27 Ligand CD70), TNFSF8 (CD30 Ligand CD153), TNFSF9 (4-1BB Ligand CD137 Ligand), TP-1, t-PA, Tpo, TRAIL, TRAIL R, TRAIL-R1, TRAIL-R2, TRANCE, transferring receptor, TRF, Trk, TROP-2, TSG, TSLP, tumor-associated antigen CA 125, tumor-associated antigen expressing Lewis Y related carbohydrate, TWEAK, TXB2, Ung, uPAR, uPAR-1, Urokinase, VCAM, VCAM-1, VECAD, VE-Cadherin, VE-cadherin-2, VEFGR-1 (fit-1), VEGF, VEGFR, VEGFR-3 (fit-4), VEGI, VIM, Viral antigens, VLA, VLA-1, VLA-4, VNR integrin, von Willebrands factor, WIF-1, WNT1, WNT2, WNT2B/13, WNT3, WNT3A, WNT4, WNT5A, WNT5B, WNT6, WNT7A, WNT7B, WNT8A, WNT8B, WNT9A, WNT9A, WNT9B, WNT10A, WNT10B, WNT11, WNT16, XCL1, XCL2, XCR1, XCR1, XEDAR, XIAP, XPD, CTLA4 (cytotoxic T lymphocyte antigen-4), PD1 (programmed cell death protein 1), PD-L1 (programmed cell death ligand 1), LAG-3 (lymphocyte activation gene-3), TIM-3 (T cell immunoglobulin and mucin protein-3), receptors for hormones, and growth factors.

[0520] 56. An antibody according to any one of Clauses 1 through 55, wherein the antibody comprises at least a second antigen binding domain that specifically binds to an antigen selected from the group consisting of: BCMA, CTLA4 (cytotoxic T lymphocyte antigen-4), PD1 (programmed cell death protein 1), PD-L1 (programmed cell death ligand 1), LAG-3 (lymphocyte activation gene-3), TIM-3, CD20, CD2, CD19, Her2, EGFR, EpCAM, FcyRIIIa (CD16), FcyRIIa (CD32a), FcyRIIb (CD32b), FcyRI (CD64), Toll-like receptors (TLRs), TLR4, TLR9, cytokines, IL-2, IL-5, IL-13, IL-6, IL-17, IL-12, IL-23, TNFα, TGFb, cytokine receptors, IL-2R, chemokines, chemokine receptors, growth factors, VEGF, and HGF.

[0521] 57. An antibody according to any one of Clauses 1 through 56, wherein the antibody comprises at least a second antigen binding domain that specifically binds to an antigen, wherein said antibody comprises a multispecific format selected from the group consisting of: Fab-Fc-scFv, “bottle-opener, Mab-scFv, Mab-Fv, Dual scFv, central Fv, central scFv, one-arm central scFv, Fab-Fab, Fab-Fv, mAb-Fv, mAb-Fab, DART, BiTE, common light chain-IgG, TandAb, Cross-Mab, SEED, BEAT, TrioMab, and DuetMab.

[0522] 58. An isolated nucleic acid sequence encoding an antibody according to any one of Clauses 1 through 57.

[0523] 59. An expression vector comprising the isolated nucleic acid sequence according to Clause 58.

[0524] 60. A host cell transfected, transformed, or transduced with a nucleic acid sequence according to Clause 58 or an expression vector according to Clause 59.

[0525] 61. A pharmaceutical composition comprising: one or more of an antibody according to any one of Clauses 1 through 57; and a pharmaceutically acceptable carrier and/or excipient.

[0526] 62. A pharmaceutical composition comprising: one or more nucleic acid sequences according to Clause 58; or one or more the expression vectors according to Clause 59; and a pharmaceutically acceptable carrier and/or excipient.

[0527] 63. A method of treating or delaying the progression of a disorder in a mammal in need of such treating, the method comprising administering one or more antibodies according to any one of Clauses 1 through 57, wherein the disorder is decreased or ameliorated as a result of said administering.

[0528] 64. A method of preventing or decreasing risk of developing a disorder in a mammal by administering an antibody according any one of Clauses 1 through 57, wherein the disorder is prevented as a result of said administering.

[0529] 65. A method of treating a disorder in a mammal in need of such treating, wherein the disorder comprises a proliferative disorder, an oncological disorder, an immuno-oncological disorder, a neurological disorder, a neurodegenerative disorder, or an autoimmune disorder, comprising administering one or more antibodies according to any one of Clauses 1 through 57, wherein the disorder is decreased or ameliorated as a result of said administering.

[0530] 66. The method according to any one of Clauses 63 through 65, wherein the method further comprises administering to the mammal an additional therapeutic agent.

[0531] 67. The method according to any one of Clauses 63 through 66, wherein the mammal is a human.

[0532] 68. A heterodimeric CD3 fusion protein comprising: a first polypeptide chain comprising a CD3 epsilon polypeptide fused to a first Fc region; and a second polypeptide chain comprising CD3 delta polypeptide fused to a second Fc region.

[0533] 69. The heterodimeric CD3 fusion protein according to Clause 68, wherein the CD3 epsilon polypeptide comprises a human CD3 epsilon polypeptide and the CD3 delta polypeptide comprises a human CD3 delta polypeptide.

[0534] 70. The heterodimeric CD3 fusion protein according to Clause 68, wherein the CD3 epsilon polypeptide is a human CD3 epsilon polypeptide and the CD3 delta polypeptide is a human CD3 delta polypeptide.

[0535] 71. The heterodimeric CD3 fusion protein according to Clause 69, wherein the CD3 epsilon polypeptide comprises a cynomolgus CD3 epsilon polypeptide and the CD3 delta polypeptide comprises a cyno CD3 delta polypeptide.

[0536] 72. The heterodimeric CD3 fusion protein according to Clause 69, wherein the CD3 epsilon polypeptide is a cynomolgus CD3 epsilon polypeptide and the CD3 delta polypeptide is a cyno CD3 delta polypeptide.

[0537] 73. The heterodimeric fusion protein according to any one of Clauses 68 through 70, wherein the first polypeptide

QDGNEEMGGITQTPYKVSISGTTVILTCPQYPGSEILWQHNDKNIGGDED
DKNIGSDEDHLSLKEFSELEQSGYYVCYPRGSKPEDANFYLYLRARVCEN
CMEMDGGSDKTHTCPPCPAPELLGGPSVFLFPPKPKDTLMISRTPEVTCV
VVDVSHEDPEVKFNWYVDGVEVHNAKTKPREEQYASTYRVVSVLTVLHQD
WLNGKEYKCKVSNKALPAPIEKTISKAKGQPREPQVYTLPPSRDELTKNQ
VSLTCLVKGFYPSDIAVEWESNGQPENNYKTTPPVLDSDGSFFLYSKLTV
DKSRWQQGNVFSCSVMHEALHNHYTQKSLSLSPGK;

and the second polypeptide chain comprises the following amino acid sequence:

FKIPIEELEDRVFVNCNTSITWVEGTVGTLLSDITRLDLGKRILDPRGIY
RCNGTDIYKDKESTVQVHYRMCQSCVELDGGSDKTHTCPPCPAPELLGGP
SVFLFPPKPKDTLMISRTPEVTCVVVDVSHEDPEVKFNWYVDGVEVHNAK
TKPREEQYASTYRVVSVLTVLHQDWLNGKEYKCKVSNKALPAPIEKTISK
AKGQPREPQVYTLPPSRDELTKNQVSLTCLVKGFYPSDIAVEWESNGQPE
NNYKTTPPVLDSDGSFFLYSKLTVDKSRWQQGNVFSCSVMHEALHNHYTQ
KSLSLSPGK.

[0538] 74. The heterodimeric fusion protein according to any one of Clauses 68, 71, and 72, wherein the first polypeptide chain comprises the following amino acid sequence:

QDGNEEMGSITQTPYQVSISGTTVILTCSQHLGSEAQWQHNGKNKEDSGD
RLFLPEFSEMEQSGYYVCYPRGSNPEDASHHLYLKARVCENCMEMDGGSD
KTHTCPPCPAPELLGGPSVFLFPPKPKDTLMISRTPEVTCVVVDVSHEDP
EVKFNWYVDGVEVHNAKTKPREEQYASTYRVVSVLTVLHQDWLNGKEYKC
KVSNKALPAPIEKTISKAKGQPREPQVYTLPPSRDELTKNQVSLTCLVKG
FYPSDIAVEWESNGQPENNYKTTPPVLDSDGSFFLYSKLTVDKSRWQQGN
VFSCSVMHEALHNHYTQKSLSLSPGK;

and the second polypeptide chain comprises the following amino acid sequence:

FKIPVEELEDRVFVKCNTSVTWVEGTVGTLLTNNTRLDLGKRILDPRGIY
RCNGTDIYKDKESAVQVHYRMCQNCVELDPGSDKTHTCPPCPAPELLGGP
SVFLFPPKPKDTLMISRTPEVTCVVVDVSHEDPEVKFNWYVDGVEVHNAK
TKPREEQYASTYRVVSVLTVLHQDWLNGKEYKCKVSNKALPAPIEKTISK
AKGQPREPQVYTLPPSRDELTKNQVSLTCLVKGFYPSDIAVEWESNGQPE
NNYKTTPPVLDSDGSFFLYSKLTVDKSRWQQGNVFSCSVMHEALHNHYTQ
KSLSLSPGK.

[0539] 75. An antibody or antigen-binding polypeptide comprising a CDRH1 comprising an amino acid sequence of FNIKDYYMH (SEQ ID NO: 6720), YTFTSYTIH (SEQ ID NO: 6721), or FTFX₁TYAMN (SEQ ID NO: 6722), wherein X₁ is any amino acid.

[0540] 76. The antibody or antigen-binding polypeptide according to Clause 75, wherein X₁ is N or D.

[0541] 77. An antibody or antigen-binding polypeptide comprising a CDRH2 comprising an amino acid sequence of WIDLENX₁NTX₂YDX₃KFOG (SEQ ID NO: 6723), wherein X₁, X₂, and X₃ independently are any amino acid.

[0542] 78. The antibody or antigen-binding polypeptide according to Clause 77, wherein X₁ is not G.

[0543] 79. The antibody or antigen binding polypeptide of any of Clauses 77-78, wherein X₂ is V or I.

[0544] 80. The antibody or antigen binding polypeptide of any of Clauses 77-79, wherein X₃ is not G.

[0545] 81. An antibody or antigen-binding polypeptide comprising a CDRH3 comprising an amino acid sequence of X₁QSYSX₂RT (SEQ ID NO: 6724) or X₃RDX₄YGX₅YFYDV (SEQ ID NO: 6725), wherein X₁, X₂, X₃, X₄, and X₅ are independently are any amino acid.

[0546] 82. The antibody or antigen-binding polypeptide of Clause 81, wherein X₁ is K or T.

[0547] 83. The antibody or antigen-binding polypeptide of Clause 81, wherein X₁ is T.

[0548] 84. The antibody or antigen-binding polypeptide of any of Clauses 81-83, wherein X₂ is R or L.

[0549] 85. The antibody or antigen-binding polypeptide of any of Clauses 81-83, wherein X₃ is A or G.

[0550] 86. The antibody or antigen-binding polypeptide of any of Clause 81-83, wherein X₄ is not G.

[0551] 87. The antibody or antigen-binding polypeptide of any of Clauses 81-86, wherein X₅ is R, A, G, or L.

[0552] 88. An antibody or antigen-binding polypeptide comprising a CDRL1 comprising an amino acid sequence of X₁KSSQX₂LLX₃X₄RTGKX₅YLA (SEQ ID NO: 6726), wherein X₁, X₂, X₃, X₄, and X₅ independently are any amino acid.

[0553] 89. The antibody or antigen-binding polypeptide according to Clause 88, wherein X₁ is K or R.

[0554] 90. The antibody or antigen-binding polypeptide according to Clause 88, wherein X₂ is S or N

[0555] 91. The antibody or antigen-binding polypeptide according to Clause 88, wherein X₃ is E or N.

[0556] 92. The antibody or antigen-binding polypeptide according to Clause 88, wherein X₄ is A or S.

[0557] 93. The antibody or antigen-binding polypeptide according to Clause 88, wherein X₅ is N or S.

[0558] 94. An antibody or antigen-binding polypeptide comprising a CDRL2 comprising an amino acid sequence of WASTRES (SEQ ID NO: 6727) or GTX₁KRAP (SEQ ID NO: 6728), wherein X₁ is any amino acid.

[0559] 95. The antibody or antigen-binding polypeptide according to Clause 94, wherein X₁ is N or D.

[0560] 96. An antibody or antigen-binding polypeptide comprising a CDRL3 comprising an amino acid sequence of KQSYSX₁RT (SEQ ID NO: 6729), wherein X₁ is any amino acid.

[0561] 97. The antibody or antigen-binding polypeptide according to Clause 96, wherein X₁ is R.

[0562] 98. The antibody or antigen binding polypeptide according to Clause 96, wherein X₁ is L or I.

[0563] 99. An antibody or antigen binding polypeptide comprising one or more of a CDRH1 according to any of Clauses 75-76, a CDRH2 according to any of Clauses 77-81, and a CDRH3 according to any of Clauses 84-90.

[0564] 100. An antibody or antigen-binding polypeptide comprising one or more of a CDRL1 according to any of Clauses 88-91, a CDRL2 according to any of Clauses 94-95, and a CDRL3 according to any of Clauses 96-98.

[0565] 101. An antibody or antigen-binding polypeptide comprising a CDRH1 according to any of Clauses 75-76, a CDRH2 according to any of Clauses 77-81, a CDRH3 according to any of Clauses 84-90, and a CDRL1 according to any of Clauses 88-91, a CDRL2 according to any of Clauses 94-95, and a CDRL3 according to any of Clauses 96-98.

LENGTHY TABLES
The patent application contains a lengthy table section. A copy of the table is available in electronic form from the USPTO web site (http://seqdata.uspto.gov/?pageRequest=docDetail&DocID=US20200190189A1). An electronic copy of the table will also be available from the USPTO upon request and payment of the fee set forth in 37 CFR 1.19(b)(3).

The application's sequence listing, which the Patent Office published only in electronic form, follows.

SEQUENCE LISTING (6480 sequences)

SEQ ID NO: 1 - DNA, 375 bp, Artificial Sequence
  Description of Artificial Sequence: Synthetic Heavy chain variable region nucleic acid sequence
gaggtgcagctgttggagtctgggggaggcttggtacagcctggggggtccctgagactctcctgtgcagcctctggattcacctttaacacatatgccatgaattgggtccgccaggctccagggaaggggctggagtgggtcgcaaggattagatccaagtataacaattacgctacatactacgcagactccgtgaaggatcggttcaccatctccagagacgattccaagagcacgctgtatctgcaaatgaacagcctgagagccgaggacacggcggtgtactactgcgtcaggcacggtaacttcgggaacagttatgtatcctggtttgcttattggggccaaggaaccctggtcaccgtctcctca

SEQ ID NO: 2 - protein, 125 aa, Artificial Sequence
  Description of Artificial Sequence: Synthetic Heavy chain variable region amino acid sequence
EVQLLESGGGLVQPGGSLRLSCAASGFTFNTYAMNWVRQAPGKGLEWVARIRSKYNNYATYYADSVKDRFTISRDDSKSTLYLQMNSLRAEDTAVYYCVRHGNFGNSYVSWFAYWGQGTLVTVSS

SEQ ID NO: 3 - protein, 9 aa, Artificial Sequence
  Description of Artificial Sequence: Synthetic Heavy chain variable region CDR H1 amino acid sequence
FTFNTYAMN

SEQ ID NO: 4 - DNA, 27 bp, Artificial Sequence
  Description of Artificial Sequence: Synthetic Heavy chain variable region CDR H1 nucleic acid sequence
ttcacctttaacacatatgccatgaat

SEQ ID NO: 5 - protein, 19 aa, Artificial Sequence
  Description of Artificial Sequence: Synthetic Heavy chain variable region CDR H2 amino acid sequence
RIRSKYNNYATYYADSVKD

SEQ ID NO: 6 - DNA, 57 bp, Artificial Sequence
  Description of Artificial Sequence: Synthetic Heavy chain variable region CDR H2 nucleic acid sequence
aggattagatccaagtataacaattacgctacatactacgcagactccgtgaaggat

SEQ ID NO: 7 - protein, 16 aa, Artificial Sequence
  Description of Artificial Sequence: Synthetic Heavy chain variable region CDR H3 amino acid sequence
VRHGNFGNSYVSWFAY

SEQ ID NO: 8 - DNA, 48 bp, Artificial Sequence
  Description of Artificial Sequence: Synthetic Heavy chain variable region CDR H3 nucleic acid sequence
gtcaggcacggtaacttcgggaacagttatgtatcctggtttgcttat

SEQ ID NO: 9 - DNA, 327 bp, Artificial Sequence
  Description of Artificial Sequence: Synthetic Light chain variable region nucleic acid sequence
cagactgtggtgacccaggagccatcgttctcagtgtcccctggagggacagtcacactcacttgtagatcaagcactggcgcagtcactactagtaactacgccaactgggtccagcagaccccaggccaggctccacgcggactcatcggcggcacaaacaagcgcgctcctggggtccctgatcgcttctctggctccctgcttggggacaaagctgccctcaccatcacgggggcccaggcagatgatgaatctgattattactgtgcgctgtggtacagtaacctttgggtgttcggcggagggaccaagctgaccgtccta

SEQ ID NO: 10 - protein, 109 aa, Artificial Sequence
  Description of Artificial Sequence: Synthetic Light chain variable region amino acid sequence
QTVVTQEPSFSVSPGGTVTLTCRSSTGAVTTSNYANWVQQTPGQAPRGLIGGTNKRAPGVPDRFSGSLLGDKAALTITGAQADDESDYYCALWYSNLWVFGGGTKLTVL

SEQ ID NO: 11 - protein, 14 aa, Artificial Sequence
  Description of Artificial Sequence: Synthetic Light chain variable region CDR L1 amino acid sequence
RSSTGAVTTSNYAN

SEQ ID NO: 12 - DNA, 42 bp, Artificial Sequence
  Description of Artificial Sequence: Synthetic Light chain variable region CDR L1 nucleic acid sequence
agatcaagcactggcgcagtcactactagtaactacgccaac

SEQ ID NO: 13 - protein, 7 aa, Artificial Sequence
  Description of Artificial Sequence: Synthetic Light chain variable region CDR L2 amino acid sequence
GTNKRAP

SEQ ID NO: 14 - DNA, 21 bp, Artificial Sequence
  Description of Artificial Sequence: Synthetic Light chain variable region CDR L2 nucleic acid sequence
ggcacaaacaagcgcgctcct

SEQ ID NO: 15 - protein, 9 aa, Artificial Sequence
  Description of Artificial Sequence: Synthetic Light chain variable region CDR L3 amino acid sequence
ALWYSNLWV

SEQ ID NO: 16 - DNA, 27 bp, Artificial Sequence
  Description of Artificial Sequence: Synthetic Light chain variable region CDR L3 nucleic acid sequence
gcgctgtggtacagtaacctttgggtg

SEQ ID NO: 17 - DNA, 375 bp, Artificial Sequence
  Description of Artificial Sequence: Synthetic Heavy chain variable region nucleic acid sequence
gaggtgcagctgttggagtctgggggaggcttggtacagcctggggggtccctgagactctcctgtgcagcctctggattcacctttgacacatatgccatgaattgggttcgccaggctccagggaaggggctggagtgggtcgcaaggattagatccaagtataacaattacgctacatactacgcagactccgtgaaggatcggttcaccatctccagagacgattccaagagcacgctgtatctgcaaatgaacagcctgagagccgaggacacggcggtgtactactgcgtcaggcacggtaacttcgggaacggttacgtatcctggtttgctcattggggccaaggaaccctggtcaccgtctcctca

SEQ ID NO: 18 - protein, 125 aa, Artificial Sequence
  Description of Artificial Sequence: Synthetic Heavy chain variable region amino acid sequence
EVQLLESGGGLVQPGGSLRLSCAASGFTFDTYAMNWVRQAPGKGLEWVARIRSKYNNYATYYADSVKDRFTISRDDSKSTLYLQMNSLRAEDTAVYYCVRHGNFGNGYVSWFAHWGQGTLVTVSS

SEQ ID NO: 19 - protein, 9 aa, Artificial Sequence
  Description of Artificial Sequence: Synthetic Heavy chain variable region CDR H1 amino acid sequence
FTFDTYAMN

SEQ ID NO: 20 - DNA, 27 bp, Artificial Sequence
  Description of Artificial Sequence: Synthetic Heavy chain variable region CDR H1 nucleic acid sequence
ttcacctttgacacatatgccatgaat

SEQ ID NO: 21 - protein, 19 aa, Artificial Sequence
  Description of Artificial Sequence: Synthetic Heavy chain variable region CDR H2 amino acid sequence
RIRSKYNNYATYYADSVKD

SEQ ID NO: 22 - DNA, 57 bp, Artificial Sequence; identical to SEQ ID NO: 6
  Description of Artificial Sequence: Synthetic Heavy chain variable region CDR H2 nucleic acid sequence

SEQ ID NO: 23 - protein, 16 aa, Artificial Sequence
  Description of Artificial Sequence: Synthetic Heavy chain variable region CDR H3 amino acid sequence
VRHGNFGNGYVSWFAH

SEQ ID NO: 24 - DNA, 48 bp, Artificial Sequence
  Description of Artificial Sequence: Synthetic Heavy chain variable region CDR H3 nucleic acid sequence
gtcaggcacggtaacttcgggaacggttacgtatcctggtttgctcat

SEQ ID NO: 25 - DNA, 327 bp, Artificial Sequence
  Description of Artificial Sequence: Synthetic Light chain variable region nucleic acid sequence
cagactgtggtgacccaggagccatcgctctcggtgtcccctggagggacagtcacactcacttgtagatcaagcactggcgcagtcactactagtaactacgccaactgggtccagcagaccccaggccaggctccgcgcggactcatcggcggcacagacaagcgcgctcccggggtccctgatcgcttctctggctccctgcttggggacaaagctgccctcaccatcacgggggcccaggcagaggatgaatctgattattactgtgcgctgtggtacagtaacctttgggtgttcggcggagggaccaagctgaccgtccta

SEQ ID NO: 26 - protein, 109 aa, Artificial Sequence
  Description of Artificial Sequence: Synthetic Light chain variable region amino acid sequence
QTVVTQEPSLSVSPGGTVTLTCRSSTGAVTTSNYANWVQQTPGQAPRGLIGGTDKRAPGVPDRFSGSLLGDKAALTITGAQAEDESDYYCALWYSNLWVFGGGTKLTVL

SEQ ID NO: 27 - protein, 14 aa, Artificial Sequence
  Description of Artificial Sequence: Synthetic Light chain variable region CDR L1 amino acid sequence
RSSTGAVTTSNYAN

SEQ ID NO: 28 - DNA, 42 bp, Artificial Sequence; identical to SEQ ID NO: 12
  Description of Artificial Sequence: Synthetic Light chain variable region CDR L1 nucleic acid sequence

SEQ ID NO: 29 - protein, 7 aa, Artificial Sequence
  Description of Artificial Sequence: Synthetic Light chain variable region CDR L2 amino acid sequence
GTDKRAP

SEQ ID NO: 30 - DNA, 21 bp, Artificial Sequence
  Description of Artificial Sequence: Synthetic Light chain variable region CDR L2 nucleic acid sequence
ggcacagacaagcgcgctccc

SEQ ID NO: 31 - protein, 9 aa, Artificial Sequence
  Description of Artificial Sequence: Synthetic Light chain variable region CDR L3 amino acid sequence
ALWYSNLWV

SEQ ID NO: 32 - DNA, 27 bp, Artificial Sequence
  Description of Artificial Sequence: Synthetic Light chain variable region CDR L3 nucleic acid sequence
gcgctgtggtacagtaacctttgggtg

SEQ ID NO: 33 - DNA, 375 bp, Artificial Sequence
  Description of Artificial Sequence: Synthetic Heavy chain variable region nucleic acid sequence
gaggtgcagctgttggagtctgggggaggcttggtacagcctggggggtccctgagactctcctgtgcagcctctggattcacctttgacacatatgccatgaattgggtccgccaggctccagggaaggggctggagtgggtcgcaaggattagatccaagtataacaattacgctacatactacgcagactccgtgaaggatcggttcaccatctccagagacgattccaagagcacgctgtatctgcaaatgaacagcctgagagccgaggacacggcggtgtactactgcgtcaggcacggtaacttcgggaacggttacgtatcctggtttgctcattggggccaaggaaccctggtcaccgtctcctca

SEQ ID NO: 34 - protein, 125 aa, Artificial Sequence; identical to SEQ ID NO: 18
  Description of Artificial Sequence: Synthetic Heavy chain variable region amino acid sequence

SEQ ID NO: 35 - protein, 9 aa, Artificial Sequence
  Description of Artificial Sequence: Synthetic Heavy chain variable region CDR H1 amino acid sequence
FTFDTYAMN

SEQ ID NO: 36 - DNA, 27 bp, Artificial Sequence
  Description of Artificial Sequence: Synthetic Heavy chain variable region CDR H1 nucleic acid sequence
ttcacctttgacacatatgccatgaat

SEQ ID NO: 37 - protein, 19 aa, Artificial Sequence
  Description of Artificial Sequence: Synthetic Heavy chain variable region CDR H2 amino acid sequence
RIRSKYNNYATYYADSVKD

SEQ ID NO: 38 - DNA, 57 bp, Artificial Sequence; identical to SEQ ID NO: 6
  Description of Artificial Sequence: Synthetic Heavy chain variable region CDR H2 nucleic acid sequence

SEQ ID NO: 39 - protein, 16 aa, Artificial Sequence
  Description of Artificial Sequence: Synthetic Heavy chain variable region CDR H3 amino acid sequence
VRHGNFGNGYVSWFAH

SEQ ID NO: 40 - DNA, 48 bp, Artificial Sequence; identical to SEQ ID NO: 24
  Description of Artificial Sequence: Synthetic Heavy chain variable region CDR H3 nucleic acid sequence

SEQ ID NO: 41 - DNA, 327 bp, Artificial Sequence
  Description of Artificial Sequence: Synthetic Light chain variable region nucleic acid sequence
cagactgtggtgacccaggagccatcgctctcagtgtcccctggagggacagtcacactcacttgtagatcaagcactggcgcagtcactactagtaactacgccaactgggtccagcagaccccaggccaggctccgcgcggactcatcggcggcacaaacaagcgcgctcctggggtccctgatcgcttctctggctccctgcttggggacaaagctgccctcaccatcacgggggcccaggcagatgatgaagctgattattactgtgcgctgtggtacagtaacctttgggtgttcggcggagggaccaagctgaccgtccta

SEQ ID NO: 42 - protein, 109 aa, Artificial Sequence
  Description of Artificial Sequence: Synthetic Light chain variable region amino acid sequence
QTVVTQEPSLSVSPGGTVTLTCRSSTGAVTTSNYANWVQQTPGQAPRGLIGGTNKRAPGVPDRFSGSLLGDKAALTITGAQADDEADYYCALWYSNLWVFGGGTKLTVL

SEQ ID NO: 43 - protein, 14 aa, Artificial Sequence
  Description of Artificial Sequence: Synthetic Light chain variable region CDR L1 amino acid sequence
RSSTGAVTTSNYAN

SEQ ID NO: 44 - DNA, 42 bp, Artificial Sequence; identical to SEQ ID NO: 12
  Description of Artificial Sequence: Synthetic Light chain variable region CDR L1 nucleic acid sequence

SEQ ID NO: 45 - protein, 7 aa, Artificial Sequence
  Description of Artificial Sequence: Synthetic Light chain variable region CDR L2 amino acid sequence
GTNKRAP

SEQ ID NO: 46 - DNA, 21 bp, Artificial Sequence
  Description of Artificial Sequence: Synthetic Light chain variable region CDR L2 nucleic acid sequence
ggcacaaacaagcgcgctcct

SEQ ID NO: 47 - protein, 9 aa, Artificial Sequence
  Description of Artificial Sequence: Synthetic Light chain variable region CDR L3 amino acid sequence
ALWYSNLWV

SEQ ID NO: 48 - DNA, 27 bp, Artificial Sequence
  Description of Artificial Sequence: Synthetic Light chain variable region CDR L3 nucleic acid sequence
gcgctgtggtacagtaacctttgggtg

SEQ ID NO: 49 - DNA, 375 bp, Artificial Sequence
  Description of Artificial Sequence: Synthetic Heavy chain variable region nucleic acid sequence
gaggtgcagctgttggagtctgggggaggcttggtacagcctggggggtccctgaggctctcctgtgcagcctctggattcacctttaacacatatgccatgaattgggtccgccaggctccagggaaggggctggagtgggtcgcaaggattaggtccaagtataacaattacgctacatactacgcagactccgtgaaggatcggttcaccatctccagagacgattccaagagcacgctgtatctgcaaatgaacagcctgagagccgaggacacggcggtgtactactgcgtcaggcacagtaacttcgggaacggttatgtatcctggtttgcttactggggccaaggaaccctggtcaccgtctcctca

SEQ ID NO: 50 - protein, 125 aa, Artificial Sequence
  Description of Artificial Sequence: Synthetic Heavy chain variable region amino acid sequence
EVQLLESGGGLVQPGGSLRLSCAASGFTFNTYAMNWVRQAPGKGLEWVARIRSKYNNYATYYADSVKDRFTISRDDSKSTLYLQMNSLRAEDTAVYYCVRHSNFGNGYVSWFAYWGQGTLVTVSS

SEQ ID NO: 51 - protein, 9 aa, Artificial Sequence
  Description of Artificial Sequence: Synthetic Heavy chain variable region CDR H1 amino acid sequence
FTFNTYAMN

SEQ ID NO: 52 - DNA, 27 bp, Artificial Sequence
  Description of Artificial Sequence: Synthetic Heavy chain variable region CDR H1 nucleic acid sequence
ttcacctttaacacatatgccatgaat

SEQ ID NO: 53 - protein, 19 aa, Artificial Sequence
  Description of Artificial Sequence: Synthetic Heavy chain variable region CDR H2 amino acid sequence
RIRSKYNNYATYYADSVKD

SEQ ID NO: 54 - DNA, 57 bp, Artificial Sequence
  Description of Artificial Sequence: Synthetic Heavy chain variable region CDR H2 nucleic acid sequence
aggattaggtccaagtataacaattacgctacatactacgcagactccgtgaaggat

SEQ ID NO: 55 - protein, 16 aa, Artificial Sequence
  Description of Artificial Sequence: Synthetic Heavy chain variable region CDR H3 amino acid sequence
VRHSNFGNGYVSWFAY

SEQ ID NO: 56 - DNA, 48 bp, Artificial Sequence
  Description of Artificial Sequence: Synthetic Heavy chain variable region CDR H3 nucleic acid sequence
gtcaggcacagtaacttcgggaacggttatgtatcctggtttgcttac

SEQ ID NO: 57 - DNA, 327 bp, Artificial Sequence; identical to SEQ ID NO: 25
  Description of Artificial Sequence: Synthetic Light chain variable region nucleic acid sequence

SEQ ID NO: 58 - protein, 109 aa, Artificial Sequence; identical to SEQ ID NO: 26
  Description of Artificial Sequence: Synthetic Light chain variable region amino acid sequence

SEQ ID NO: 59 - protein, 14 aa, Artificial Sequence
  Description of Artificial Sequence: Synthetic Light chain variable region CDR L1 amino acid sequence
RSSTGAVTTSNYAN

SEQ ID NO: 60 - DNA, 42 bp, Artificial Sequence; identical to SEQ ID NO: 12
  Description of Artificial Sequence: Synthetic Light chain variable region CDR L1 nucleic acid sequence

SEQ ID NO: 61 - protein, 7 aa, Artificial Sequence
  Description of Artificial Sequence: Synthetic Light chain variable region CDR L2 amino acid sequence
GTDKRAP

SEQ ID NO: 62 - DNA, 21 bp, Artificial Sequence
  Description of Artificial Sequence: Synthetic Light chain variable region CDR L2 nucleic acid sequence
ggcacagacaagcgcgctccc

SEQ ID NO: 63 - protein, 9 aa, Artificial Sequence
  Description of Artificial Sequence: Synthetic Light chain variable region CDR L3 amino acid sequence
ALWYSNLWV

SEQ ID NO: 64 - DNA, 27 bp, Artificial Sequence
  Description of Artificial Sequence: Synthetic Light chain variable region CDR L3 nucleic acid sequence
gcgctgtggtacagtaacctttgggtg

SEQ ID NO: 65 - DNA, 375 bp, Artificial Sequence
  Description of Artificial Sequence: Synthetic Heavy chain variable region nucleic acid sequence
gaggtgcagctgttggagtctgggggaggcttggtacagcctggggggtccctgagactctcctgtgcagcctctggattcacctttgacacatatgccatgaattgggtccgccaggctccagggaaggggctggagtgggtcgcaaggattagatccaagtataacaattacgctacatactacgcagactccgtgaagggtcggttcaccatctccagagacgattccaagagcacgctgtatctgcaagtgaacagcctgagagccgaggacacggcggtgtactactgcgtcaggcacggtaacttcgggaacagttacgtatcctggtttgctcattggggccaaggaaccctggtcaccgtctcctca

SEQ ID NO: 66 - protein, 125 aa, Artificial Sequence
  Description of Artificial Sequence: Synthetic Heavy chain variable region amino acid sequence
EVQLLESGGGLVQPGGSLRLSCAASGFTFDTYAMNWVRQAPGKGLEWVARIRSKYNNYATYYADSVKGRFTISRDDSKSTLYLQVNSLRAEDTAVYYCVRHGNFGNSYVSWFAHWGQGTLVTVSS

SEQ ID NO: 67 - protein, 9 aa, Artificial Sequence
  Description of Artificial Sequence: Synthetic Heavy chain variable region CDR H1 amino acid sequence
FTFDTYAMN

SEQ ID NO: 68 - DNA, 27 bp, Artificial Sequence
  Description of Artificial Sequence: Synthetic Heavy chain variable region CDR H1 nucleic acid sequence
ttcacctttgacacatatgccatgaat

SEQ ID NO: 69 - protein, 19 aa, Artificial Sequence
  Description of Artificial Sequence: Synthetic Heavy chain variable region CDR H2 amino acid sequence
RIRSKYNNYATYYADSVKG

SEQ ID NO: 70 - DNA, 57 bp, Artificial Sequence
  Description of Artificial Sequence: Synthetic Heavy chain variable region CDR H2 nucleic acid sequence
aggattagatccaagtataacaattacgctacatactacgcagactccgtgaagggt

SEQ ID NO: 71 - protein, 16 aa, Artificial Sequence
  Description of Artificial Sequence: Synthetic Heavy chain variable region CDR H3 amino acid sequence
VRHGNFGNSYVSWFAH

SEQ ID NO: 72 - DNA, 48 bp, Artificial Sequence
  Description of Artificial Sequence: Synthetic Heavy chain variable region CDR H3 nucleic acid sequence
gtcaggcacggtaacttcgggaacagttacgtatcctggtttgctcat

SEQ ID NO: 73 - DNA, 327 bp, Artificial Sequence; identical to SEQ ID NO: 25
  Description of Artificial Sequence: Synthetic Light chain variable region nucleic acid sequence

SEQ ID NO: 74 - protein, 109 aa, Artificial Sequence; identical to SEQ ID NO: 26
  Description of Artificial Sequence: Synthetic Light chain variable region amino acid sequence

SEQ ID NO: 75 - protein, 14 aa, Artificial Sequence
  Description of Artificial Sequence: Synthetic Light chain variable region CDR L1 amino acid sequence
RSSTGAVTTSNYAN

SEQ ID NO: 76 - DNA, 42 bp, Artificial Sequence; identical to SEQ ID NO: 12
  Description of Artificial Sequence: Synthetic Light chain variable region CDR L1 nucleic acid sequence

SEQ ID NO: 77 - protein, 7 aa, Artificial Sequence
  Description of Artificial Sequence: Synthetic Light chain variable region CDR L2 amino acid sequence
GTDKRAP

SEQ ID NO: 78 - DNA, 21 bp, Artificial Sequence
  Description of Artificial Sequence: Synthetic Light chain variable region CDR L2 nucleic acid sequence
ggcacagacaagcgcgctccc

SEQ ID NO: 79 - protein, 9 aa, Artificial Sequence
  Description of Artificial Sequence: Synthetic Light chain variable region CDR L3 amino acid sequence
ALWYSNLWV

SEQ ID NO: 80 - DNA, 27 bp, Artificial Sequence
  Description of Artificial Sequence: Synthetic Light chain variable region CDR L3 nucleic acid sequence
gcgctgtggtacagtaacctttgggtg

SEQ ID NO: 81 - DNA, 375 bp, Artificial Sequence
  Description of Artificial Sequence: Synthetic Heavy chain variable region nucleic acid sequence
gaggtgcagctgttggagtctgggggaggcttggtacagcctggggggtccctgagactctcctgtgcagcctctggattcacctttgacacatatgccatgaattgggtccgccaggctccagggaaggggctggagtgggtcgcaaggattagatccaagtataacaattacgctacatactacgcagactccgtgaaggatcggttcaccatctccagagacgattccaagagcacgctgtatctgcaaatgaacagcctgagagccgaggacacggcggtgtactactgcgtcaggcacggtaacttcgggaacagttacgtatcctggtttgctcattggggccaaggaaccctggtcaccgtctcctca

SEQ ID NO: 82 - protein, 125 aa, Artificial Sequence
  Description of Artificial Sequence: Synthetic Heavy chain variable region amino acid sequence
EVQLLESGGGLVQPGGSLRLSCAASGFTFDTYAMNWVRQAPGKGLEWVARIRSKYNNYATYYADSVKDRFTISRDDSKSTLYLQMNSLRAEDTAVYYCVRHGNFGNSYVSWFAHWGQGTLVTVSS

SEQ ID NO: 83 - protein, 9 aa, Artificial Sequence
  Description of Artificial Sequence: Synthetic Heavy chain variable region CDR H1 amino acid sequence
FTFDTYAMN

SEQ ID NO: 84 - DNA, 27 bp, Artificial Sequence
  Description of Artificial Sequence: Synthetic Heavy chain variable region CDR H1 nucleic acid sequence
ttcacctttgacacatatgccatgaat

SEQ ID NO: 85 - protein, 19 aa, Artificial Sequence
  Description of Artificial Sequence: Synthetic Heavy chain variable region CDR H2 amino acid sequence
RIRSKYNNYATYYADSVKD

SEQ ID NO: 86 - DNA, 57 bp, Artificial Sequence; identical to SEQ ID NO: 6
  Description of Artificial Sequence: Synthetic Heavy chain variable region CDR H2 nucleic acid sequence

SEQ ID NO: 87 - protein, 16 aa, Artificial Sequence
  Description of Artificial Sequence: Synthetic Heavy chain variable region CDR H3 amino acid sequence
VRHGNFGNSYVSWFAH

SEQ ID NO: 88 - DNA, 48 bp, Artificial Sequence; identical to SEQ ID NO: 72
  Description of Artificial Sequence: Synthetic Heavy chain variable region CDR H3 nucleic acid sequence

SEQ ID NO: 89 - DNA, 327 bp, Artificial Sequence
  Description of Artificial Sequence: Synthetic Light chain variable region nucleic acid sequence
cagactgtggtgacccaggagccatcgctctcagtgtcccctggagggacagtcacactcacttgtagatcaagcactggcgcagtcactactagtaactacgccaactggatccagcagaccccaggccaggccccgcgcggactcatcggcggcacaaacaagcgcgctcctggggtccctgatcgcctctctggctccctgcttggggacaaagctgccctcaccatcacgggggcccaggcagatgatgaagctgattattactgtgcgctgtggtacagtaacctttgggtgttcggcggagggaccaagctgaccgtccta

SEQ ID NO: 90 - protein, 109 aa, Artificial Sequence
  Description of Artificial Sequence: Synthetic Light chain variable region amino acid sequence
QTVVTQEPSLSVSPGGTVTLTCRSSTGAVTTSNYANWIQQTPGQAPRGLIGGTNKRAPGVPDRLSGSLLGDKAALTITGAQADDEADYYCALWYSNLWVFGGGTKLTVL

SEQ ID NO: 91 - protein, 14 aa, Artificial Sequence
  Description of Artificial Sequence: Synthetic Light chain variable region CDR L1 amino acid sequence
RSSTGAVTTSNYAN

SEQ ID NO: 92 - DNA, 42 bp, Artificial Sequence; identical to SEQ ID NO: 12
  Description of Artificial Sequence: Synthetic Light chain variable region CDR L1 nucleic acid sequence

SEQ ID NO: 93 - protein, 7 aa, Artificial Sequence
  Description of Artificial Sequence: Synthetic Light chain variable region CDR L2 amino acid sequence
GTNKRAP

SEQ ID NO: 94 - DNA, 21 bp, Artificial Sequence
  Description of Artificial Sequence: Synthetic Light chain variable region CDR L2 nucleic acid sequence
ggcacaaacaagcgcgctcct

SEQ ID NO: 95 - protein, 9 aa, Artificial Sequence
  Description of Artificial Sequence: Synthetic Light chain variable region CDR L3 amino acid sequence
ALWYSNLWV

SEQ ID NO: 96 - DNA, 27 bp, Artificial Sequence
  Description of Artificial Sequence: Synthetic Light chain variable region CDR L3 nucleic acid sequence
gcgctgtggtacagtaacctttgggtg

SEQ ID NO: 97 - DNA, 375 bp, Artificial Sequence
  Description of Artificial Sequence: Synthetic Heavy chain variable region nucleic acid sequence
gaggtgcagctgttggagtctgggggaggcttggtacagcctggggggtccctgagactctcctgtgcagcctctggattcacctttgacacatatgccatgaattgggtccgccaggctccggggaaggggctggagtgggtcgcaaggattagatccaagtataacaattacgctacgtactacgcagactccgtgaaggatcggttcaccatctccagagacgattccaagagcacgctgtacctgcaaataaacagcctgagagccgaggacacggcggtgtactactgcgtcaggcacggtaacttcgggaacagttacgtatcctggtttgctcattggggccaaggagccctggtcaccgtctcctca

SEQ ID NO: 98 - protein, 125 aa, Artificial Sequence
  Description of Artificial Sequence: Synthetic Heavy chain variable region amino acid sequence
EVQLLESGGGLVQPGGSLRLSCAASGFTFDTYAMNWVRQAPGKGLEWVARIRSKYNNYATYYADSVKDRFTISRDDSKSTLYLQINSLRAEDTAVYYCVRHGNFGNSYVSWFAHWGQGALVTVSS

SEQ ID NO: 99 - protein, 9 aa, Artificial Sequence
  Description of Artificial Sequence: Synthetic Heavy chain variable region CDR H1 amino acid sequence
FTFDTYAMN

SEQ ID NO: 100 - DNA, 27 bp, Artificial Sequence
  Description of Artificial Sequence: Synthetic Heavy chain variable region CDR H1 nucleic acid sequence
ttcacctttgacacatatgccatgaat

SEQ ID NO: 101 - protein, 19 aa, Artificial Sequence
  Description of Artificial Sequence: Synthetic Heavy chain variable region CDR H2 amino acid sequence
RIRSKYNNYATYYADSVKD

SEQ ID NO: 102 - DNA, 57 bp, Artificial Sequence
  Description of Artificial Sequence: Synthetic Heavy chain variable region CDR H2 nucleic acid sequence
aggattagatccaagtataacaattacgctacgtactacgcagactccgtgaaggat

SEQ ID NO: 103 - protein, 16 aa, Artificial Sequence
  Description of Artificial Sequence: Synthetic Heavy chain variable region CDR H3 amino acid sequence
VRHGNFGNSYVSWFAH

SEQ ID NO: 104 - DNA, 48 bp, Artificial Sequence; identical to SEQ ID NO: 72
  Description of Artificial Sequence: Synthetic Heavy chain variable region CDR H3 nucleic acid sequence

SEQ ID NO: 105 - DNA, 327 bp, Artificial Sequence; identical to SEQ ID NO: 25
  Description of Artificial Sequence: Synthetic Light chain variable region nucleic acid sequence

SEQ ID NO: 106 - protein, 109 aa, Artificial Sequence; identical to SEQ ID NO: 26
  Description of Artificial Sequence: Synthetic Light chain variable region amino acid sequence

SEQ ID NO: 107 - protein, 14 aa, Artificial Sequence
  Description of Artificial Sequence: Synthetic Light chain variable region CDR L1 amino acid sequence
RSSTGAVTTSNYAN

SEQ ID NO: 108 - DNA, 42 bp, Artificial Sequence; identical to SEQ ID NO: 12
  Description of Artificial Sequence: Synthetic Light chain variable region CDR L1 nucleic acid sequence

SEQ ID NO: 109 - protein, 7 aa, Artificial Sequence
  Description of Artificial Sequence: Synthetic Light chain variable region CDR L2 amino acid sequence
GTDKRAP

SEQ ID NO: 110 - DNA, 21 bp, Artificial Sequence
  Description of Artificial Sequence: Synthetic Light chain variable region CDR L2 nucleic acid sequence
ggcacagacaagcgcgctccc

SEQ ID NO: 111 - protein, 9 aa, Artificial Sequence
  Description of Artificial Sequence: Synthetic Light chain variable region CDR L3 amino acid sequence
ALWYSNLWV

SEQ ID NO: 112 - DNA, 27 bp, Artificial Sequence
  Description of Artificial Sequence: Synthetic Light chain variable region CDR L3 nucleic acid sequence
gcgctgtggtacagtaacctttgggtg

SEQ ID NO: 113 - DNA, 375 bp, Artificial Sequence; identical to SEQ ID NO: 81
  Description of Artificial Sequence: Synthetic Heavy chain variable region nucleic acid sequence

SEQ ID NO: 114 - protein, 125 aa, Artificial Sequence; identical to SEQ ID NO: 82
  Description of Artificial Sequence: Synthetic Heavy chain variable region amino acid sequence

SEQ ID NO: 115 - protein, 9 aa, Artificial Sequence
  Description of Artificial Sequence: Synthetic Heavy chain variable region CDR H1 amino acid sequence
FTFDTYAMN

SEQ ID NO: 116 - DNA, 27 bp, Artificial Sequence
  Description of Artificial Sequence: Synthetic Heavy chain variable region CDR H1 nucleic acid sequence
ttcacctttgacacatatgccatgaat

SEQ ID NO: 117 - protein, 19 aa, Artificial Sequence
  Description of Artificial Sequence: Synthetic Heavy chain variable region CDR H2 amino acid sequence
RIRSKYNNYATYYADSVKD

SEQ ID NO: 118 - DNA, 57 bp, Artificial Sequence; identical to SEQ ID NO: 6
  Description of Artificial Sequence: Synthetic Heavy chain variable region CDR H2 nucleic acid sequence

SEQ ID NO: 119 - protein, 16 aa, Artificial Sequence
  Description of Artificial Sequence: Synthetic Heavy chain variable region CDR H3 amino acid sequence
VRHGNFGNSYVSWFAH

SEQ ID NO: 120 - DNA, 48 bp, Artificial Sequence; identical to SEQ ID NO: 72
  Description of Artificial Sequence: Synthetic Heavy chain variable region CDR H3 nucleic acid sequence

SEQ ID NO: 121 - DNA, 327 bp, Artificial Sequence
  Description of Artificial Sequence: Synthetic Light chain variable region nucleic acid sequence
cagactgtggtgacccaggagccatcgctctcggtgtcccctggagggacagtcacactcacttgtagatcaagcactggcgcagtcactactagtaactacgccaactgggtccagcagaccccaggccaggctccgcgcggactcatcggcggcacagacaagcgcgctcccggggtccctgagcgcttctctggctccctgcttggggacaaagctgccctcaccatcacgggggcccaggcagaggatgaatctgattattactgtgtgctgtggtacagtaacctttgggtgttcggcggagggaccaagctgaccgtccta

SEQ ID NO: 122 - protein, 109 aa, Artificial Sequence
  Description of Artificial Sequence: Synthetic Light chain variable region amino acid sequence
QTVVTQEPSLSVSPGGTVTLTCRSSTGAVTTSNYANWVQQTPGQAPRGLIGGTDKRAPGVPERFSGSLLGDKAALTITGAQAEDESDYYCVLWYSNLWVFGGGTKLTVL

SEQ ID NO: 123 - protein, 14 aa, Artificial Sequence
  Description of Artificial Sequence: Synthetic Light chain variable region CDR L1 amino acid sequence
RSSTGAVTTSNYAN

SEQ ID NO: 124 - DNA, 42 bp, Artificial Sequence; identical to SEQ ID NO: 12
  Description of Artificial Sequence: Synthetic Light chain variable region CDR L1 nucleic acid sequence

SEQ ID NO: 125 - protein, 7 aa, Artificial Sequence
  Description of Artificial Sequence: Synthetic Light chain variable region CDR L2 amino acid sequence
GTDKRAP

SEQ ID NO: 126 - DNA, 21 bp, Artificial Sequence
  Description of Artificial Sequence: Synthetic Light chain variable region CDR L2 nucleic acid sequence
ggcacagacaagcgcgctccc

SEQ ID NO: 127 - protein, 9 aa, Artificial Sequence
  Description of Artificial Sequence: Synthetic Light chain variable region CDR L3 amino acid sequence
VLWYSNLWV

SEQ ID NO: 128 - DNA, 27 bp, Artificial Sequence
  Description of Artificial Sequence: Synthetic Light chain variable region CDR L3 nucleic acid sequence
gtgctgtggtacagtaacctttgggtg

SEQ ID NO: 129 - DNA, 375 bp, Artificial Sequence; identical to SEQ ID NO: 81
  Description of Artificial Sequence: Synthetic Heavy chain variable region nucleic acid sequence

SEQ ID NO: 130 - protein, 125 aa, Artificial Sequence; identical to SEQ ID NO: 82
  Description of Artificial Sequence: Synthetic Heavy chain variable region amino acid sequence

SEQ ID NO: 131 - protein, 9 aa, Artificial Sequence
  Description of Artificial Sequence: Synthetic Heavy chain variable region CDR H1 amino acid sequence
FTFDTYAMN

SEQ ID NO: 132 - DNA, 27 bp, Artificial Sequence
  Description of Artificial Sequence: Synthetic Heavy chain variable region CDR H1 nucleic acid sequence
ttcacctttgacacatatgccatgaat

SEQ ID NO: 133 - protein, 19 aa, Artificial Sequence
  Description of Artificial Sequence: Synthetic Heavy chain variable region CDR H2 amino acid sequence
RIRSKYNNYATYYADSVKD

SEQ ID NO: 134 - DNA, 57 bp, Artificial Sequence; identical to SEQ ID NO: 6
  Description of Artificial Sequence: Synthetic Heavy chain variable region CDR H2 nucleic acid sequence

SEQ ID NO: 135 - protein, 16 aa, Artificial Sequence
  Description of Artificial Sequence: Synthetic Heavy chain variable region CDR H3 amino acid sequence
VRHGNFGNSYVSWFAH

SEQ ID NO: 136 - DNA, 48 bp, Artificial Sequence; identical to SEQ ID NO: 72
  Description of Artificial Sequence: Synthetic Heavy chain variable region CDR H3 nucleic acid sequence

SEQ ID NO: 137 - DNA, 327 bp, Artificial Sequence
  Description of Artificial Sequence: Synthetic Light chain variable region nucleic acid sequence
cagactgtggtgacccaggagccatcgctctcggtgtcccctggagggacagtcacactcacttgtagatcaagcactggcgcagtcactactagtaactacgccaactgggtccagcagaccccaggccaggctccgcgcggactcatcggcggcacagacaagcgcgctcccggggtccctgatcgcttctctggctccctgctcggggacaaagctgccctcaccatcacgggggcccaggcagaggatgaatctgattattactgtgcgctgtggtacagtaaccattgggtgttcggcggagggaccaagctgaccgtccta

SEQ ID NO: 138 - protein, 109 aa, Artificial Sequence
  Description of Artificial Sequence: Synthetic Light chain variable region amino acid sequence
QTVVTQEPSLSVSPGGTVTLTCRSSTGAVTTSNYANWVQQTPGQAPRGLIGGTDKRAPGVPDRFSGSLLGDKAALTITGAQAEDESDYYCALWYSNHWVFGGGTKLTVL

SEQ ID NO: 139 - protein, 14 aa, Artificial Sequence
  Description of Artificial Sequence: Synthetic Light chain variable region CDR L1 amino acid sequence
RSSTGAVTTSNYAN

SEQ ID NO: 140 - DNA, 42 bp, Artificial Sequence; identical to SEQ ID NO: 12
  Description of Artificial Sequence: Synthetic Light chain variable region CDR L1 nucleic acid sequence

SEQ ID NO: 141 - protein, 7 aa, Artificial Sequence
  Description of Artificial Sequence: Synthetic Light chain variable region CDR L2 amino acid sequence
GTDKRAP

SEQ ID NO: 142 - DNA, 21 bp, Artificial Sequence
  Description of Artificial Sequence: Synthetic Light chain variable region CDR L2 nucleic acid sequence
ggcacagacaagcgcgctccc

SEQ ID NO: 143 - protein, 9 aa, Artificial Sequence
  Description of Artificial Sequence: Synthetic Light chain variable region CDR L3 amino acid sequence
ALWYSNHWV

SEQ ID NO: 144 - DNA, 27 bp, Artificial Sequence
  Description of Artificial Sequence: Synthetic Light chain variable region CDR L3 nucleic acid sequence
gcgctgtggtacagtaaccattgggtg

SEQ ID NO: 145 - DNA, 375 bp, Artificial Sequence
  Description of Artificial Sequence: Synthetic Heavy chain variable region nucleic acid sequence
gaggtgcagctgttggagtctgggggaggcttggtacagcctggggggtccctgagactctcctgtgcagcctctggattcacctttgacacatatgccatgaattgggtccgccaggctccagggaaggggctggagtgggtcgcaaggattagatccaagtataacaattacgctacatactacgcagactccgtgaaggatcggttcgccatctccagagacgattccaagagcacgctgtatctgcaaatgaacagcctgagagccgaggacacggcggtgtactactgcgtcaggcacagtaacttcgggaacagttacgtatcctggtttgctcattggggccaaggaaccctggtcaccgtctcctca

SEQ ID NO: 146 - protein, 125 aa, Artificial Sequence
  Description of Artificial Sequence: Synthetic Heavy chain variable region amino acid sequence
EVQLLESGGGLVQPGGSLRLSCAASGFTFDTYAMNWVRQAPGKGLEWVARIRSKYNNYATYYADSVKDRFAISRDDSKSTLYLQMNSLRAEDTAVYYCVRHSNFGNSYVSWFAHWGQGTLVTVSS

SEQ ID NO: 147 - protein, 9 aa, Artificial Sequence
  Description of Artificial Sequence: Synthetic Heavy chain variable region CDR H1 amino acid sequence
FTFDTYAMN

SEQ ID NO: 148 - DNA, 27 bp, Artificial Sequence
  Description of Artificial Sequence: Synthetic Heavy chain variable region CDR H1 nucleic acid sequence
ttcacctttgacacatatgccatgaat

SEQ ID NO: 149 - protein, 19 aa, Artificial Sequence
  Description of Artificial Sequence: Synthetic Heavy chain variable region CDR H2 amino acid sequence
RIRSKYNNYATYYADSVKD

SEQ ID NO: 150 - DNA, 57 bp, Artificial Sequence; identical to SEQ ID NO: 6
  Description of Artificial Sequence: Synthetic Heavy chain variable region CDR H2 nucleic acid sequence

SEQ ID NO: 151 - protein, 16 aa, Artificial Sequence
  Description of Artificial Sequence: Synthetic Heavy chain variable region CDR H3 amino acid sequence
VRHSNFGNSYVSWFAH

SEQ ID NO: 152 - DNA, 48 bp, Artificial Sequence
  Description of Artificial Sequence: Synthetic Heavy chain variable region CDR H3 nucleic acid sequence
gtcaggcacagtaacttcgggaacagttacgtatcctggtttgctcat

SEQ ID NO: 153 - DNA, 327 bp, Artificial Sequence; identical to SEQ ID NO: 41
  Description of Artificial Sequence: Synthetic Light chain variable region nucleic acid sequence

SEQ ID NO: 154 - protein, 109 aa, Artificial Sequence; identical to SEQ ID NO: 42
  Description of Artificial Sequence: Synthetic Light chain variable region amino acid sequence

SEQ ID NO: 155 - protein, 14 aa, Artificial Sequence
  Description of Artificial Sequence: Synthetic Light chain variable region CDR L1 amino acid sequence
RSSTGAVTTSNYAN

SEQ ID NO: 156 - DNA, 42 bp, Artificial Sequence; identical to SEQ ID NO: 12
  Description of Artificial Sequence: Synthetic Light chain variable region CDR L1 nucleic acid sequence

SEQ ID NO: 157 - protein, 7 aa, Artificial Sequence
  Description of Artificial Sequence: Synthetic Light chain variable region CDR L2 amino acid sequence
GTNKRAP

SEQ ID NO: 158 - DNA, 21 bp, Artificial Sequence
  Description of Artificial Sequence: Synthetic Light chain variable region CDR L2 nucleic acid sequence
ggcacaaacaagcgcgctcct

SEQ ID NO: 159 - protein, 9 aa, Artificial Sequence
  Description of Artificial Sequence: Synthetic Light chain variable region CDR L3 amino acid sequence
ALWYSNLWV

SEQ ID NO: 160 - DNA, 27 bp, Artificial Sequence
  Description of Artificial Sequence: Synthetic Light chain variable region CDR L3 nucleic acid sequence
gcgctgtggtacagtaacctttgggtg

SEQ ID NO: 161 - DNA, 375 bp, Artificial Sequence
  Description of Artificial Sequence: Synthetic Heavy chain variable region nucleic acid sequence
gaggtgcagctgttggagtctgggggaggcttggtacagcctggggggtccctgagactctcctgtgcagcctctggattcacctctgccacatatgccatgaattgggtccgccaggctccagggaaggggctggagtgggtcgcaaggattagatccaagtataacaattacgctacatactacgcagactccgtgaaggatcggttcaccatctccagagacgattccaagagcacgctgtatctgcaaatgaacagcctgagagccgaggacacggcggtgtactactgcgtcaggcacggtaacttcgggaacagtcacgtatcctggtttgctcattggggccaaggaaccctggtcaccgtctcctca

SEQ ID NO: 162 - protein, 125 aa, Artificial Sequence
  Description of Artificial Sequence: Synthetic Heavy chain variable region amino acid sequence
EVQLLESGGGLVQPGGSLRLSCAASGFTSATYAMNWVRQAPGKGLEWVARIRSKYNNYATYYADSVKDRFTISRDDSKSTLYLQMNSLRAEDTAVYYCVRHGNFGNSHVSWFAHWGQGTLVTVSS

SEQ ID NO: 163 - protein, 9 aa, Artificial Sequence
  Description of Artificial Sequence: Synthetic Heavy chain variable region CDR H1 amino acid sequence
FTSATYAMN

SEQ ID NO: 164 - DNA, 27 bp, Artificial Sequence
  Description of Artificial Sequence: Synthetic Heavy chain variable region CDR H1 nucleic acid sequence
ttcacctctgccacatatgccatgaat

SEQ ID NO: 165 - protein, 19 aa, Artificial Sequence
  Description of Artificial Sequence: Synthetic Heavy chain variable region CDR H2 amino acid sequence
RIRSKYNNYATYYADSVKD

SEQ ID NO: 166 - DNA, 57 bp, Artificial Sequence; identical to SEQ ID NO: 6
  Description of Artificial Sequence: Synthetic Heavy chain variable region CDR H2 nucleic acid sequence

SEQ ID NO: 167 - protein, 16 aa, Artificial Sequence
  Description of Artificial Sequence: Synthetic Heavy chain variable region CDR H3 amino acid sequence
VRHGNFGNSHVSWFAH

SEQ ID NO: 168 - DNA, 48 bp, Artificial Sequence
  Description of Artificial Sequence: Synthetic Heavy chain variable region CDR H3 nucleic acid sequence
gtcaggcacggtaacttcgggaacagtcacgtatcctggtttgctcat

SEQ ID NO: 169 - DNA, 327 bp, Artificial Sequence; identical to SEQ ID NO: 41
  Description of Artificial Sequence: Synthetic Light chain variable region nucleic acid sequence

SEQ ID NO: 170 - protein, 109 aa, Artificial Sequence; identical to SEQ ID NO: 42
  Description of Artificial Sequence: Synthetic Light chain variable region amino acid sequence

SEQ ID NO: 171 - protein, 14 aa, Artificial Sequence
  Description of Artificial Sequence: Synthetic Light chain variable region CDR L1 amino acid sequence
RSSTGAVTTSNYAN

SEQ ID NO: 172 - DNA, 42 bp, Artificial Sequence; identical to SEQ ID NO: 12
  Description of Artificial Sequence: Synthetic Light chain variable region CDR L1 nucleic acid sequence

SEQ ID NO: 173 - protein, 7 aa, Artificial Sequence
  Description of Artificial Sequence: Synthetic Light chain variable region CDR L2 amino acid sequence
GTNKRAP

SEQ ID NO: 174 - DNA, 21 bp, Artificial Sequence
  Description of Artificial Sequence: Synthetic Light chain variable region CDR L2 nucleic acid sequence
ggcacaaacaagcgcgctcct

SEQ ID NO: 175 - protein, 9 aa, Artificial Sequence
  Description of Artificial Sequence: Synthetic Light chain variable region CDR L3 amino acid sequence
ALWYSNLWV

SEQ ID NO: 176 - DNA, 27 bp, Artificial Sequence
  Description of Artificial Sequence: Synthetic Light chain variable region CDR L3 nucleic acid sequence
gcgctgtggtacagtaacctttgggtg

SEQ ID NO: 177 - DNA, 375 bp, Artificial Sequence
  Description of Artificial Sequence: Synthetic Heavy chain variable region nucleic acid sequence
gaggtgcagctgttggagtctgggggaggcttggtacagcctggggggtccctgagactctcctgtgcagcctctggattcacctttaacacatatgccatgaattgggtccgccaggctccagggaaggggctggagtgggtcgcaaggattagatccaagtataacaattacgctacatactacgcagactccgtgaaggatcggttcaccatctccagagacgattccaagaacacgctgtatctgcaaatgaacagcctgagagccgaggacacggcggtgtactactgcgtcaggcacggtaacttcgggaacagttatgtatcctggtttgcttcttggggccaaggaaccctggtcaccgtctcctca

SEQ ID NO: 178 - protein, 125 aa, Artificial Sequence
  Description of Artificial Sequence: Synthetic Heavy chain variable region amino acid sequence
EVQLLESGGGLVQPGGSLRLSCAASGFTFNTYAMNWVRQAPGKGLEWVARIRSKYNNYATYYADSVKDRFTISRDDSKNTLYLQMNSLRAEDTAVYYCVRHGNFGNSYVSWFASWGQGTLVTVSS

SEQ ID NO: 179 - protein, 9 aa, Artificial Sequence
  Description of Artificial Sequence: Synthetic Heavy chain variable region CDR H1 amino acid sequence
FTFNTYAMN

SEQ ID NO: 180 - DNA, 27 bp, Artificial Sequence
  Description of Artificial Sequence: Synthetic Heavy chain variable region CDR H1 nucleic acid sequence
ttcacctttaacacatatgccatgaat

SEQ ID NO: 181 - protein, 19 aa, Artificial Sequence
  Description of Artificial Sequence: Synthetic Heavy chain variable region CDR H2 amino acid sequence
RIRSKYNNYATYYADSVKD

SEQ ID NO: 182 - DNA, 57 bp, Artificial Sequence; identical to SEQ ID NO: 6
  Description of Artificial Sequence: Synthetic Heavy chain variable region CDR H2 nucleic acid sequence

SEQ ID NO: 183 - protein, 16 aa, Artificial Sequence
  Description of Artificial Sequence: Synthetic Heavy chain variable region CDR H3 amino acid sequence
VRHGNFGNSYVSWFAS

SEQ ID NO: 184 - DNA, 48 bp, Artificial Sequence
  Description of Artificial Sequence: Synthetic Heavy chain variable region CDR H3 nucleic acid sequence
gtcaggcacggtaacttcgggaacagttatgtatcctggtttgcttct

SEQ ID NO: 185 - DNA, 327 bp, Artificial Sequence
  Description of Artificial Sequence: Synthetic Light chain variable region nucleic acid sequence
cagactgtggtgacccaggagccatcgttctcagtgtcccctggagggacagtcacactcacttgtggctcaagcactggcgcagtcactactagtaactacgccaactgggtccagcagaccccaggccaggctccacgcggactcatcggcggcacagacaagcgcgctcctggggtccctgatcgcttctctggctccctgcttggggacaaagctgccctcaccatcacgggggcccaggcagatgatgaatctgattattactgtgcgctgtggtacagtaacctttgggtgttcggcggagggaccaagctgaccgtccta

SEQ ID NO: 186 - protein, 109 aa, Artificial Sequence
  Description of Artificial Sequence: Synthetic Light chain variable region amino acid sequence
QTVVTQEPSFSVSPGGTVTLTCGSSTGAVTTSNYANWVQQTPGQAPRGLIGGTDKRAPGVPDRFSGSLLGDKAALTITGAQADDESDYYCALWYSNLWVFGGGTKLTVL

SEQ ID NO: 187 - protein, 14 aa, Artificial Sequence
  Description of Artificial Sequence: Synthetic Light chain variable region CDR L1 amino acid sequence
GSSTGAVTTSNYAN

SEQ ID NO: 188 - DNA, 42 bp, Artificial Sequence
  Description of Artificial Sequence: Synthetic Light chain variable region CDR L1 nucleic acid sequence
ggctcaagcactggcgcagtcactactagtaactacgccaac

SEQ ID NO: 189 - protein, 7 aa, Artificial Sequence
  Description of Artificial Sequence: Synthetic Light chain variable region CDR L2 amino acid sequence
GTDKRAP

SEQ ID NO: 190 - DNA, 21 bp, Artificial Sequence
  Description of Artificial Sequence: Synthetic Light chain variable region CDR L2 nucleic acid sequence
ggcacagacaagcgcgctcct

SEQ ID NO: 191 - protein, 9 aa, Artificial Sequence
  Description of Artificial Sequence: Synthetic Light chain variable region CDR L3 amino acid sequence
ALWYSNLWV

SEQ ID NO: 192 - DNA, 27 bp, Artificial Sequence
  Description of Artificial Sequence: Synthetic Light chain variable region CDR L3 nucleic acid sequence
gcgctgtggtacagtaacctttgggtg

SEQ ID NO: 193 - DNA, 375 bp, Artificial Sequence; identical to SEQ ID NO: 17
  Description of Artificial Sequence: Synthetic Heavy chain variable region nucleic acid sequence

SEQ ID NO: 194 - protein, 125 aa, Artificial Sequence; identical to SEQ ID NO: 18
  Description of Artificial Sequence: Synthetic Heavy chain variable region amino acid sequence

SEQ ID NO: 195 - protein, 9 aa, Artificial Sequence
  Description of Artificial Sequence: Synthetic Heavy chain variable region CDR H1 amino acid sequence
FTFDTYAMN

SEQ ID NO: 196 - DNA, 27 bp, Artificial Sequence
  Description of Artificial Sequence: Synthetic Heavy chain variable region CDR H1 nucleic acid sequence
ttcacctttgacacatatgccatgaat

SEQ ID NO: 197 - protein, 19 aa, Artificial Sequence
  Description of Artificial Sequence: Synthetic Heavy chain variable region CDR H2 amino acid sequence
RIRSKYNNYATYYADSVKD

SEQ ID NO: 198 - DNA, 57 bp, Artificial Sequence; identical to SEQ ID NO: 6
  Description of Artificial Sequence: Synthetic Heavy chain variable region CDR H2 nucleic acid sequence

SEQ ID NO: 199 - protein, 16 aa, Artificial Sequence
  Description of Artificial Sequence: Synthetic Heavy chain variable region CDR H3 amino acid sequence
VRHGNFGNGYVSWFAH

SEQ ID NO: 200 - DNA, 48 bp, Artificial Sequence; identical to SEQ ID NO: 24
  Description of Artificial Sequence: Synthetic Heavy chain variable region CDR H3 nucleic acid sequence

SEQ ID NO: 201 - DNA, 327 bp, Artificial Sequence
  Description of Artificial Sequence: Synthetic Light chain variable region nucleic acid sequence
cagactgtggtgacccaggagccatcgctctcagtgtcccctggagggacagtcacactcacttgtggatcaagcactggcgcagtcactactagtaactacgccaactgggtccagcagaccccaggccaggctccgcgcggactcatcggcggcacagacaagcgcgctcctggggtccctgatcgcttctctggctccctgcttggggacaaagctgccctcatcatcacgggggcccaggcagatgatgaagctgattattactgtgcgctgtggtacagtaaccattgggtgttcggcggagggaccaagctgaccgtccta

SEQ ID NO: 202 - protein, 109 aa, Artificial Sequence
  Description of Artificial Sequence: Synthetic Light chain variable region amino acid sequence
QTVVTQEPSLSVSPGGTVTLTCGSSTGAVTTSNYANWVQQTPGQAPRGLIGGTDKRAPGVPDRFSGSLLGDKAALIITGAQADDEADYYCALWYSNHWVFGGGTKLTVL

SEQ ID NO: 203 - protein, 14 aa, Artificial Sequence
  Description of Artificial Sequence: Synthetic Light chain variable region CDR L1 amino acid sequence
GSSTGAVTTSNYAN

SEQ ID NO: 204 - DNA, 42 bp, Artificial Sequence
  Description of Artificial Sequence: Synthetic Light chain variable region CDR L1 nucleic acid sequence
ggatcaagcactggcgcagtcactactagtaactacgccaac

SEQ ID NO: 205 - protein, 7 aa, Artificial Sequence
  Description of Artificial Sequence: Synthetic Light chain variable region CDR L2 amino acid sequence
GTDKRAP

SEQ ID NO: 206 - DNA, 21 bp, Artificial Sequence
  Description of Artificial Sequence: Synthetic Light chain variable region CDR L2 nucleic acid sequence
ggcacagacaagcgcgctcct

SEQ ID NO: 207 - protein, 9 aa, Artificial Sequence
  Description of Artificial Sequence: Synthetic Light chain variable region CDR L3 amino acid sequence
ALWYSNHWV

SEQ ID NO: 208 - DNA, 27 bp, Artificial Sequence
  Description of Artificial Sequence: Synthetic Light chain variable region CDR L3 nucleic acid sequence
gcgctgtggtacagtaaccattgggtg

SEQ ID NO: 209 - DNA, 375 bp, Artificial Sequence; identical to SEQ ID NO: 17
  Description of Artificial Sequence: Synthetic Heavy chain variable region nucleic acid sequence

SEQ ID NO: 210 - protein, 125 aa, Artificial Sequence; identical to SEQ ID NO: 18
  Description of Artificial Sequence: Synthetic Heavy chain variable region amino acid sequence

SEQ ID NO: 211 - protein, 9 aa, Artificial Sequence
  Description of Artificial Sequence: Synthetic Heavy chain variable region CDR H1 amino acid sequence
FTFDTYAMN

SEQ ID NO: 212 - DNA, 27 bp, Artificial Sequence
  Description of Artificial Sequence: Synthetic Heavy chain variable region CDR H1 nucleic acid sequence
ttcacctttgacacatatgccatgaat

SEQ ID NO: 213 - protein, 19 aa, Artificial Sequence
  Description of Artificial Sequence: Synthetic Heavy chain variable region CDR H2 amino acid sequence
RIRSKYNNYATYYADSVKD

SEQ ID NO: 214 - DNA, 57 bp, Artificial Sequence; identical to SEQ ID NO: 6
  Description of Artificial Sequence: Synthetic Heavy chain variable region CDR H2 nucleic acid sequence

SEQ ID NO: 215 - protein, 16 aa, Artificial Sequence
  Description of Artificial Sequence: Synthetic Heavy chain variable region CDR H3 amino acid sequence
VRHGNFGNGYVSWFAH

SEQ ID NO: 216 - DNA, 48 bp, Artificial Sequence; identical to SEQ ID NO: 24
  Description of Artificial Sequence: Synthetic Heavy chain variable region CDR H3 nucleic acid sequence

SEQ ID NO: 217 - DNA, 327 bp, Artificial Sequence
  Description of Artificial Sequence: Synthetic Light chain variable region nucleic acid sequence
cagactgtggtgacccaggagccatcgctctcagtgtcccctggagggacagtcacactcacttgtggatcaagcactggcgcagtcactactagtaactacgccaactgggtccagcagaccccaggccaggctccgcgcggactcatcggcggcacagacaagcgcgctcctggggtccctgatcgcttctctggctccctgcttggggacaaagctgccctcaccatcacgggggtccaggcagatgatgaagctgattattactgtgcgctgtggtacagtaaccattgggtgttcggcggagggaccaagctgaccgtccta

SEQ ID NO: 218 - protein, 109 aa, Artificial Sequence
  Description of Artificial Sequence: Synthetic Light chain variable region amino acid sequence
QTVVTQEPSLSVSPGGTVTLTCGSSTGAVTTSNYANWVQQTPGQAPRGLIGGTDKRAPGVPDRFSGSLLGDKAALTITGVQADDEADYYCALWYSNHWVFGGGTKLTVL

SEQ ID NO: 219 - protein, 14 aa, Artificial Sequence
  Description of Artificial Sequence: Synthetic Light chain variable region CDR L1 amino acid sequence
GSSTGAVTTSNYAN

SEQ ID NO: 220 - DNA, 42 bp, Artificial Sequence; identical to SEQ ID NO: 204
  Description of Artificial Sequence: Synthetic Light chain variable region CDR L1 nucleic acid sequence

SEQ ID NO: 221 - protein, 7 aa, Artificial Sequence
  Description of Artificial Sequence: Synthetic Light chain variable region CDR L2 amino acid sequence
GTDKRAP

SEQ ID NO: 222 - DNA, 21 bp, Artificial Sequence
  Description of Artificial Sequence: Synthetic Light chain variable region CDR L2 nucleic acid sequence
ggcacagacaagcgcgctcct

SEQ ID NO: 223 - protein, 9 aa, Artificial Sequence
  Description of Artificial Sequence: Synthetic Light chain variable region CDR L3 amino acid sequence
ALWYSNHWV

SEQ ID NO: 224 - DNA, 27 bp, Artificial Sequence
  Description of Artificial Sequence: Synthetic Light chain variable region CDR L3 nucleic acid sequence
gcgctgtggtacagtaaccattgggtg

SEQ ID NO: 225 - DNA, 375 bp, Artificial Sequence; identical to SEQ ID NO: 17
  Description of Artificial Sequence: Synthetic Heavy chain variable region nucleic acid sequence

SEQ ID NO: 226 - protein, 125 aa, Artificial Sequence; identical to SEQ ID NO: 18
  Description of Artificial Sequence: Synthetic Heavy chain variable region amino acid sequence

SEQ ID NO: 227 - protein, 9 aa, Artificial Sequence
  Description of Artificial Sequence: Synthetic Heavy chain variable region CDR H1 amino acid sequence
FTFDTYAMN

SEQ ID NO: 228 - DNA, 27 bp, Artificial Sequence
  Description of Artificial Sequence: Synthetic Heavy chain variable region CDR H1 nucleic acid sequence
ttcacctttgacacatatgccatgaat

SEQ ID NO: 229 - protein, 19 aa, Artificial Sequence
  Description of Artificial Sequence: Synthetic Heavy chain variable region CDR H2 amino acid sequence
RIRSKYNNYATYYADSVKD

SEQ ID NO: 230 - DNA, 57 bp, Artificial Sequence; identical to SEQ ID NO: 6
  Description of Artificial Sequence: Synthetic Heavy chain variable region CDR H2 nucleic acid sequence

SEQ ID NO: 231 - protein, 16 aa, Artificial Sequence
  Description of Artificial Sequence: Synthetic Heavy chain variable region CDR H3 amino acid sequence
VRHGNFGNGYVSWFAH

SEQ ID NO: 232 - DNA, 48 bp, Artificial Sequence; identical to SEQ ID NO: 24
  Description of Artificial Sequence: Synthetic Heavy chain variable region CDR H3 nucleic acid sequence

SEQ ID NO: 233 - DNA, 327 bp, Artificial Sequence
  Description of Artificial Sequence: Synthetic Light chain variable region nucleic acid sequence
cagactgtggtgacccaggagccatcgctctcagtgtcccctggagggacagtcacactcacttgtggatcaagcgctggcgcagtcactactagtaactacgccaactgggtccagcagaccccaggccaggctccacgcggactcatcggcggcacagacaagcgcgctcctggggtccctgatcgcttctctggctccctgcttggggacaaagctgccctcaccatcacgggggcccaggcagatgatgaagctgattattactgtgtgctgtggtacagtaacctttgggtgttcggcggagggaccaagctgaccgtccta

SEQ ID NO: 234 - protein, 109 aa, Artificial Sequence
  Description of Artificial Sequence: Synthetic Light chain variable region amino acid sequence
QTVVTQEPSLSVSPGGTVTLTCGSSAGAVTTSNYANWVQQTPGQAPRGLIGGTDKRAPGVPDRFSGSLLGDKAALTITGAQADDEADYYCVLWYSNLWVFGGGTKLTVL

SEQ ID NO: 235 - protein, 14 aa, Artificial Sequence
  Description of Artificial Sequence: Synthetic Light chain variable region CDR L1 amino acid sequence
GSSAGAVTTSNYAN

SEQ ID NO: 236 - DNA, 42 bp, Artificial Sequence
  Description of Artificial Sequence: Synthetic Light chain variable region CDR L1 nucleic acid sequence
ggatcaagcgctggcgcagtcactactagtaactacgccaac

SEQ ID NO: 237 - protein, 7 aa, Artificial Sequence
  Description of Artificial Sequence: Synthetic Light chain variable region CDR L2 amino acid sequence
GTDKRAP

SEQ ID NO: 238 - DNA, 21 bp, Artificial Sequence
  Description of Artificial Sequence: Synthetic Light chain variable region CDR L2 nucleic acid sequence
ggcacagacaagcgcgctcct

SEQ ID NO: 239 - protein, 9 aa, Artificial Sequence
  Description of Artificial Sequence: Synthetic Light chain variable region CDR L3 amino acid sequence
VLWYSNLWV

SEQ ID NO: 240 - DNA, 27 bp, Artificial Sequence
  Description of Artificial Sequence: Synthetic Light chain variable region CDR L3 nucleic acid sequence
gtgctgtggtacagtaacctttgggtg

SEQ ID NO: 241 - DNA, 375 bp, Artificial Sequence; identical to SEQ ID NO: 17
  Description of Artificial Sequence: Synthetic Heavy chain variable region nucleic acid sequence

SEQ ID NO: 242 - protein, 125 aa, Artificial Sequence; identical to SEQ ID NO: 18
  Description of Artificial Sequence: Synthetic Heavy chain variable region amino acid sequence

SEQ ID NO: 243 - protein, 9 aa, Artificial Sequence
  Description of Artificial Sequence: Synthetic Heavy chain variable region CDR H1 amino acid sequence
FTFDTYAMN

SEQ ID NO: 244 - DNA, 27 bp, Artificial Sequence
  Description of Artificial Sequence: Synthetic Heavy chain variable region CDR H1 nucleic acid sequence
ttcacctttgacacatatgccatgaat

SEQ ID NO: 245 - protein, 19 aa, Artificial Sequence
  Description of Artificial Sequence: Synthetic Heavy chain variable region CDR H2 amino acid sequence
RIRSKYNNYATYYADSVKD

SEQ ID NO: 246 - DNA, 57 bp, Artificial Sequence; identical to SEQ ID NO: 6
  Description of Artificial Sequence: Synthetic Heavy chain variable region CDR H2 nucleic acid sequence

SEQ ID NO: 247 - protein, 16 aa, Artificial Sequence
  Description of Artificial Sequence: Synthetic Heavy chain variable region CDR H3 amino acid sequence
VRHGNFGNGYVSWFAH

SEQ ID NO: 248 - DNA, 48 bp, Artificial Sequence; identical to SEQ ID NO: 24
  Description of Artificial Sequence: Synthetic Heavy chain variable region CDR H3 nucleic acid sequence

SEQ ID NO: 249 - DNA, 327 bp, Artificial Sequence
  Description of Artificial Sequence: Synthetic Light chain variable region nucleic acid sequence
cagactgtggtgacccaggagccatcgctctcagtgtcccctggagggacagtcacactcacttgtggatcaagcgctggcgcagtcactactagtaactacgccaactgggtccagcagaccccaggccaggctccacgcggactcatcggcggcacagacaagcgcgctcctggggtccctgatcgcttctctggctccctgcttggggacaaagctgccctcaccatcacgggggcccaggcagatgatgaagctgattattactgtgcgctgtggtacagtaaccattgggtgttcggcggagggaccaagctgaccgtccta

SEQ ID NO: 250 - protein, 109 aa, Artificial Sequence
  Description of Artificial Sequence: Synthetic Light chain variable region amino acid sequence
QTVVTQEPSLSVSPGGTVTLTCGSSAGAVTTSNYANWVQQTPGQAPRGLIGGTDKRAPGVPDRFSGSLLGDKAALTITGAQADDEADYYCALWYSNHWVFGGGTKLTVL

SEQ ID NO: 251 - protein, 14 aa, Artificial Sequence
  Description of Artificial Sequence: Synthetic Light chain variable region CDR L1 amino acid sequence
GSSAGAVTTSNYAN

SEQ ID NO: 252 - DNA, 42 bp, Artificial Sequence; identical to SEQ ID NO: 236
  Description of Artificial Sequence: Synthetic Light chain variable region CDR L1 nucleic acid sequence

SEQ ID NO: 253 - protein, 7 aa, Artificial Sequence
  Description of Artificial Sequence: Synthetic Light chain variable region CDR L2 amino acid sequence
GTDKRAP

SEQ ID NO: 254 - DNA, 21 bp, Artificial Sequence
  Description of Artificial Sequence: Synthetic Light chain variable region CDR L2 nucleic acid sequence
ggcacagacaagcgcgctcct

SEQ ID NO: 255 - protein, 9 aa, Artificial Sequence
  Description of Artificial Sequence: Synthetic Light chain variable region CDR L3 amino acid sequence
ALWYSNHWV

SEQ ID NO: 256 - DNA, 27 bp, Artificial Sequence
  Description of Artificial Sequence: Synthetic Light chain variable region CDR L3 nucleic acid sequence
gcgctgtggtacagtaaccattgggtg

SEQ ID NO: 257 - DNA, 375 bp, Artificial Sequence; identical to SEQ ID NO: 17
  Description of Artificial Sequence: Synthetic Heavy chain variable region nucleic acid sequence

SEQ ID NO: 258 - protein, 125 aa, Artificial Sequence; identical to SEQ ID NO: 18
  Description of Artificial Sequence: Synthetic Heavy chain variable region amino acid sequence

SEQ ID NO: 259 - protein, 9 aa, Artificial Sequence
  Description of Artificial Sequence: Synthetic Heavy chain variable region CDR H1 amino acid sequence
FTFDTYAMN

SEQ ID NO: 260 - DNA, 27 bp, Artificial Sequence
  Description of Artificial Sequence: Synthetic Heavy chain variable region CDR H1 nucleic acid sequence
ttcacctttgacacatatgccatgaat

SEQ ID NO: 261 - protein, 19 aa, Artificial Sequence
  Description of Artificial Sequence: Synthetic Heavy chain variable region CDR H2 amino acid sequence
RIRSKYNNYATYYADSVKD

SEQ ID NO: 262 - DNA, 57 bp, Artificial Sequence; identical to SEQ ID NO: 6
  Description of Artificial Sequence: Synthetic Heavy chain variable region CDR H2 nucleic acid sequence

SEQ ID NO: 263 - protein, 16 aa, Artificial Sequence
  Description of Artificial Sequence: Synthetic Heavy chain variable region CDR H3 amino acid sequence
VRHGNFGNGYVSWFAH

SEQ ID NO: 264 - DNA, 48 bp, Artificial Sequence; identical to SEQ ID NO: 24
  Description of Artificial Sequence: Synthetic Heavy chain variable region CDR H3 nucleic acid sequence

SEQ ID NO: 265 - DNA, 327 bp, Artificial Sequence
  Description of Artificial Sequence: Synthetic Light chain variable region nucleic acid sequence
cagactgtggtgacccaggagccatcgctctcagtgtcccctggagggacagtcacactcacttgtggatcaagcactggcgcagtcactactagtaactacgccaactgggtccagcagaccccaggccaggctccgcgcggactcatcggcggcacagacaagcgcgctcctggggtccctgatcgcttctctggctccctgcttggggacaaagctgccctcaccatcacgggggcccaggcagatgatgaagctgattattactgtgcgctgtggtacaataaccattgggtgttcggcggagggaccaagctgaccgtccta

SEQ ID NO: 266 - protein, 109 aa, Artificial Sequence
  Description of Artificial Sequence: Synthetic Light chain variable region amino acid sequence
QTVVTQEPSLSVSPGGTVTLTCGSSTGAVTTSNYANWVQQTPGQAPRGLIGGTDKRAPGVPDRFSGSLLGDKAALTITGAQADDEADYYCALWYNNHWVFGGGTKLTVL

SEQ ID NO: 267 - protein, 14 aa, Artificial Sequence
  Description of Artificial Sequence: Synthetic Light chain variable region CDR L1 amino acid sequence
GSSTGAVTTSNYAN

SEQ ID NO: 268 - DNA, 42 bp, Artificial Sequence; identical to SEQ ID NO: 204
  Description of Artificial Sequence: Synthetic Light chain variable region CDR L1 nucleic acid sequence

SEQ ID NO: 269 - protein, 7 aa, Artificial Sequence
  Description of Artificial Sequence: Synthetic Light chain variable region CDR L2 amino acid sequence
GTDKRAP

SEQ ID NO: 270 - DNA, 21 bp, Artificial Sequence
  Description of Artificial Sequence: Synthetic Light chain variable region CDR L2 nucleic acid sequence
ggcacagacaagcgcgctcct

SEQ ID NO: 271 - protein, 9 aa, Artificial Sequence
  Description of Artificial Sequence: Synthetic Light chain variable region CDR L3 amino acid sequence
ALWYNNHWV

SEQ ID NO: 272 - DNA, 27 bp, Artificial Sequence
  Description of Artificial Sequence: Synthetic Light chain variable region CDR L3 nucleic acid sequence
gcgctgtggtacaataaccattgggtg

SEQ ID NO: 273 - DNA, 375 bp, Artificial Sequence; identical to SEQ ID NO: 145
  Description of Artificial Sequence: Synthetic Heavy chain variable region nucleic acid sequence

SEQ ID NO: 274 - protein, 125 aa, Artificial Sequence; identical to SEQ ID NO: 146
  Description of Artificial Sequence: Synthetic Heavy chain variable region amino acid sequence

SEQ ID NO: 275 - protein, 9 aa, Artificial Sequence
  Description of Artificial Sequence: Synthetic Heavy chain variable region CDR H1 amino acid sequence
FTFDTYAMN

SEQ ID NO: 276 - DNA, 27 bp, Artificial Sequence
  Description of Artificial Sequence: Synthetic Heavy chain variable region CDR H1 nucleic acid sequence
ttcacctttgacacatatgccatgaat

SEQ ID NO: 277 - protein, 19 aa, Artificial Sequence
  Description of Artificial Sequence: Synthetic Heavy chain variable region CDR H2 amino acid sequence
RIRSKYNNYATYYADSVKD

SEQ ID NO: 278 - DNA, 57 bp, Artificial Sequence; identical to SEQ ID NO: 6
  Description of Artificial Sequence: Synthetic Heavy chain variable region CDR H2 nucleic acid sequence

SEQ ID NO: 279 - protein, 16 aa, Artificial Sequence
  Description of Artificial Sequence: Synthetic Heavy chain variable region CDR H3 amino acid sequence
VRHSNFGNSYVSWFAH

SEQ ID NO: 280 - DNA, 48 bp, Artificial Sequence; identical to SEQ ID NO: 152
  Description of Artificial Sequence: Synthetic Heavy chain variable region CDR H3 nucleic acid sequence

SEQ ID NO: 281 - DNA, 327 bp, Artificial Sequence; identical to SEQ ID NO: 233
  Description of Artificial Sequence: Synthetic Light chain variable region nucleic acid sequence

SEQ ID NO: 282 - protein, 109 aa, Artificial Sequence; identical to SEQ ID NO: 234
  Description of Artificial Sequence: Synthetic Light chain variable region amino acid sequence

SEQ ID NO: 283 - protein, 14 aa, Artificial Sequence
  Description of Artificial Sequence: Synthetic Light chain variable region CDR L1 amino acid sequence
GSSAGAVTTSNYAN

SEQ ID NO: 284 - DNA, 42 bp, Artificial Sequence; identical to SEQ ID NO: 236
  Description of Artificial Sequence: Synthetic Light chain variable region CDR L1 nucleic acid sequence

SEQ ID NO: 285 - protein, 7 aa, Artificial Sequence
  Description of Artificial Sequence: Synthetic Light chain variable region CDR L2 amino acid sequence
GTDKRAP

SEQ ID NO: 286 - DNA, 21 bp, Artificial Sequence
  Description of Artificial Sequence: Synthetic Light chain variable region CDR L2 nucleic acid sequence
ggcacagacaagcgcgctcct

SEQ ID NO: 287 - protein, 9 aa, Artificial Sequence
  Description of Artificial Sequence: Synthetic Light chain variable region CDR L3 amino acid sequence
VLWYSNLWV

SEQ ID NO: 288 - DNA, 27 bp, Artificial Sequence
  Description of Artificial Sequence: Synthetic Light chain variable region CDR L3 nucleic acid sequence
gtgctgtggtacagtaacctttgggtg

SEQ ID NO: 289 - DNA, 375 bp, Artificial Sequence; identical to SEQ ID NO: 145
  Description of Artificial Sequence: Synthetic Heavy chain variable region nucleic acid sequence

SEQ ID NO: 290 - protein, 125 aa, Artificial Sequence; identical to SEQ ID NO: 146
  Description of Artificial Sequence: Synthetic Heavy chain variable region amino acid sequence

SEQ ID NO: 291 - protein, 9 aa, Artificial Sequence
  Description of Artificial Sequence: Synthetic Heavy chain variable region CDR H1 amino acid sequence
FTFDTYAMN

SEQ ID NO: 292 - DNA, 27 bp, Artificial Sequence
  Description of Artificial Sequence: Synthetic Heavy chain variable region CDR H1 nucleic acid sequence
ttcacctttgacacatatgccatgaat

SEQ ID NO: 293 - protein, 19 aa, Artificial Sequence
  Description of Artificial Sequence: Synthetic Heavy chain variable region CDR H2 amino acid sequence
RIRSKYNNYATYYADSVKD

SEQ ID NO: 294 - DNA, 57 bp, Artificial Sequence; identical to SEQ ID NO: 6
  Description of Artificial Sequence: Synthetic Heavy chain variable region CDR H2 nucleic acid sequence

SEQ ID NO: 295 - protein, 16 aa, Artificial Sequence
  Description of Artificial Sequence: Synthetic Heavy chain variable region CDR H3 amino acid sequence
VRHSNFGNSYVSWFAH

SEQ ID NO: 296 - DNA, 48 bp, Artificial Sequence; identical to SEQ ID NO: 152
  Description of Artificial Sequence: Synthetic Heavy chain variable region CDR H3 nucleic acid sequence

SEQ ID NO: 297 - DNA, 327 bp, Artificial Sequence; identical to SEQ ID NO: 249
  Description of Artificial Sequence: Synthetic Light chain variable region nucleic acid sequence

SEQ ID NO: 298 - protein, 109 aa, Artificial Sequence; identical to SEQ ID NO: 250
  Description of Artificial Sequence: Synthetic Light chain variable region amino acid sequence

SEQ ID NO: 299 - protein, 14 aa, Artificial Sequence
  Description of Artificial Sequence: Synthetic Light chain variable region CDR L1 amino acid sequence
GSSAGAVTTSNYAN

SEQ ID NO: 300 - DNA, 42 bp, Artificial Sequence; identical to SEQ ID NO: 236
  Description of Artificial Sequence: Synthetic Light chain variable region CDR L1 nucleic acid sequence

SEQ ID NO: 301 - protein, 7 aa, Artificial Sequence
  Description of Artificial Sequence: Synthetic Light chain variable region CDR L2 amino acid sequence
GTDKRAP

SEQ ID NO: 302 - DNA, 21 bp, Artificial Sequence
  Description of Artificial Sequence: Synthetic Light chain variable region CDR L2 nucleic acid sequence
ggcacagacaagcgcgctcct

SEQ ID NO: 303 - protein, 9 aa, Artificial Sequence
  Description of Artificial Sequence: Synthetic Light chain variable region CDR L3 amino acid sequence
ALWYSNHWV

SEQ ID NO: 304 - DNA, 27 bp, Artificial Sequence
  Description of Artificial Sequence: Synthetic Light chain variable region CDR L3 nucleic acid sequence
gcgctgtggtacagtaaccattgggtg

SEQ ID NO: 305 - DNA, 375 bp, Artificial Sequence; identical to SEQ ID NO: 145
  Description of Artificial Sequence: Synthetic Heavy chain variable region nucleic acid sequence

SEQ ID NO: 306 - protein, 125 aa, Artificial Sequence; identical to SEQ ID NO: 146
  Description of Artificial Sequence: Synthetic Heavy chain variable region amino acid sequence

SEQ ID NO: 307 - protein, 9 aa, Artificial Sequence
  Description of Artificial Sequence: Synthetic Heavy chain variable region CDR H1 amino acid sequence
FTFDTYAMN

SEQ ID NO: 308 - DNA, 27 bp, Artificial Sequence
  Description of Artificial Sequence: Synthetic Heavy chain variable region CDR H1 nucleic acid sequence
ttcacctttgacacatatgccatgaat

SEQ ID NO: 309 - protein, 19 aa, Artificial Sequence
  Description of Artificial Sequence: Synthetic Heavy chain variable region CDR H2 amino acid sequence
RIRSKYNNYATYYADSVKD

SEQ ID NO: 310 - DNA, 57 bp, Artificial Sequence; identical to SEQ ID NO: 6
  Description of Artificial Sequence: Synthetic Heavy chain variable region CDR H2 nucleic acid sequence

SEQ ID NO: 311 - protein, 16 aa, Artificial Sequence
  Description of Artificial Sequence: Synthetic Heavy chain variable region CDR H3 amino acid sequence
VRHSNFGNSYVSWFAH

SEQ ID NO: 312 - DNA, 48 bp, Artificial Sequence; identical to SEQ ID NO: 152
  Description of Artificial Sequence: Synthetic Heavy chain variable region CDR H3 nucleic acid sequence

SEQ ID NO: 313 - DNA, 327 bp, Artificial Sequence; identical to SEQ ID NO: 265
  Description of Artificial Sequence: Synthetic Light chain variable region nucleic acid sequence

SEQ ID NO: 314 - protein, 109 aa, Artificial Sequence; identical to SEQ ID NO: 266
  Description of Artificial Sequence: Synthetic Light chain variable region amino acid sequence

SEQ ID NO: 315 - protein, 14 aa, Artificial Sequence
  Description of Artificial Sequence: Synthetic Light chain variable region CDR L1 amino acid sequence
GSSTGAVTTSNYAN

SEQ ID NO: 316 - DNA, 42 bp, Artificial Sequence; identical to SEQ ID NO: 204
  Description of Artificial Sequence: Synthetic Light chain variable region CDR L1 nucleic acid sequence

SEQ ID NO: 317 - protein, 7 aa, Artificial Sequence
  Description of Artificial Sequence: Synthetic Light chain variable region CDR L2 amino acid sequence
GTDKRAP

SEQ ID NO: 318 - DNA, 21 bp, Artificial Sequence
  Description of Artificial Sequence: Synthetic Light chain variable region CDR L2 nucleic acid sequence
ggcacagacaagcgcgctcct

SEQ ID NO: 319 - protein, 9 aa, Artificial Sequence
  Description of Artificial Sequence: Synthetic Light chain variable region CDR L3 amino acid sequence
ALWYNNHWV

SEQ ID NO: 320 - DNA, 27 bp, Artificial Sequence
  Description of Artificial Sequence: Synthetic Light chain variable region CDR L3 nucleic acid sequence
gcgctgtggtacaataaccattgggtg

SEQ ID NO: 321 - DNA, 375 bp, Artificial Sequence; identical to SEQ ID NO: 17
  Description of Artificial Sequence: Synthetic Heavy chain variable region nucleic acid sequence

SEQ ID NO: 322 - protein, 125 aa, Artificial Sequence; identical to SEQ ID NO: 18
  Description of Artificial Sequence: Synthetic Heavy chain variable region amino acid sequence

SEQ ID NO: 323 - protein, 9 aa, Artificial Sequence
  Description of Artificial Sequence: Synthetic Heavy chain variable region CDR H1 amino acid sequence
FTFDTYAMN

SEQ ID NO: 324 - DNA, 27 bp, Artificial Sequence
  Description of Artificial Sequence: Synthetic Heavy chain variable region CDR H1 nucleic acid sequence
ttcacctttgacacatatgccatgaat

SEQ ID NO: 325 - protein, 19 aa, Artificial Sequence
  Description of Artificial Sequence: Synthetic Heavy chain variable region CDR H2 amino acid sequence
RIRSKYNNYATYYADSVKD

SEQ ID NO: 326 - DNA, 57 bp, Artificial Sequence; identical to SEQ ID NO: 6
  Description of Artificial Sequence: Synthetic Heavy chain variable region CDR H2 nucleic acid sequence

SEQ ID NO: 327 - protein, 16 aa, Artificial Sequence
  Description of Artificial Sequence: Synthetic Heavy chain variable region CDR H3 amino acid sequence
VRHGNFGNGYVSWFAH

SEQ ID NO: 328 - DNA, 48 bp, Artificial Sequence; identical to SEQ ID NO: 24
  Description of Artificial Sequence: Synthetic Heavy chain variable region CDR H3 nucleic acid sequence

SEQ ID NO: 329 - DNA, 327 bp, Artificial Sequence
  Description of Artificial Sequence: Synthetic Light chain variable region nucleic acid sequence
cagactgtggtgacccaggagccatcgctctcagtgtcccctggagggacagtcacactcacttgtggatcaagcactggcgcagtcactactagtaactacgccaactgggtccagcagaccccaggccaggctccgcgcggactcatcggcggcacagacaagcgcgctcctggggtccctgatcgcttctctggctccctgcttggggacaaagctgccctcaccatcacgggggcccaggcagaggatgaagctgattattactgtgtgctgtggtacagtaacctttgggtgttcggcggagggaccaagctgaccgtccta

SEQ ID NO: 330 - protein, 109 aa, Artificial Sequence
  Description of Artificial Sequence: Synthetic Light chain variable region amino acid sequence
QTVVTQEPSLSVSPGGTVTLTCGSSTGAVTTSNYANWVQQTPGQAPRGLIGGTDKRAPGVPDRFSGSLLGDKAALTITGAQAEDEADYYCVLWYSNLWVFGGGTKLTVL

SEQ ID NO: 331 - protein, 14 aa, Artificial Sequence
  Description of Artificial Sequence: Synthetic Light chain variable region CDR L1 amino acid sequence
GSSTGAVTTSNYAN

SEQ ID NO: 332 - DNA, 42 bp, Artificial Sequence; identical to SEQ ID NO: 204
  Description of Artificial Sequence: Synthetic Light chain variable region CDR L1 nucleic acid sequence

SEQ ID NO: 333 - protein, 7 aa, Artificial Sequence
  Description of Artificial Sequence: Synthetic Light chain variable region CDR L2 amino acid sequence
GTDKRAP

SEQ ID NO: 334 - DNA, 21 bp, Artificial Sequence
  Description of Artificial Sequence: Synthetic Light chain variable region CDR L2 nucleic acid sequence
ggcacagacaagcgcgctcct

SEQ ID NO: 335 - protein, 9 aa, Artificial Sequence
  Description of Artificial Sequence: Synthetic Light chain variable region CDR L3 amino acid sequence
VLWYSNLWV

SEQ ID NO: 336 - DNA, 27 bp, Artificial Sequence
  Description of Artificial Sequence: Synthetic Light chain variable region CDR L3 nucleic acid sequence
gtgctgtggtacagtaacctttgggtg

SEQ ID NO: 337 - DNA, 375 bp, Artificial Sequence; identical to SEQ ID NO: 17
  Description of Artificial Sequence: Synthetic Heavy chain variable region nucleic acid sequence

SEQ ID NO: 338 - protein, 125 aa, Artificial Sequence; identical to SEQ ID NO: 18
  Description of Artificial Sequence: Synthetic Heavy chain variable region amino acid sequence

SEQ ID NO: 339 - protein, 9 aa, Artificial Sequence
  Description of Artificial Sequence: Synthetic Heavy chain variable region CDR H1 amino acid sequence
FTFDTYAMN

SEQ ID NO: 340 - DNA, 27 bp, Artificial Sequence
  Description of Artificial Sequence: Synthetic Heavy chain variable region CDR H1 nucleic acid sequence
ttcacctttgacacatatgccatgaat

SEQ ID NO: 341 - protein, 19 aa, Artificial Sequence
  Description of Artificial Sequence: Synthetic Heavy chain variable region CDR H2 amino acid sequence
RIRSKYNNYATYYADSVKD

SEQ ID NO: 342 - DNA, 57 bp, Artificial Sequence; identical to SEQ ID NO: 6
  Description of Artificial Sequence: Synthetic Heavy chain variable region CDR H2 nucleic acid sequence

SEQ ID NO: 343 - protein, 16 aa, Artificial Sequence
  Description of Artificial Sequence: Synthetic Heavy chain variable region CDR H3 amino acid sequence
VRHGNFGNGYVSWFAH

SEQ ID NO: 344 - DNA, 48 bp, Artificial Sequence; identical to SEQ ID NO: 24
  Description of Artificial Sequence: Synthetic Heavy chain variable region CDR H3 nucleic acid sequence

SEQ ID NO: 345 - DNA, 327 bp, Artificial Sequence
  Description of Artificial Sequence: Synthetic Light chain variable region nucleic acid sequence
cagactgtggtgacccaggagccatcgctctcagtgtcccctggagggacagtcacactcacttgtggatcaagcactggcgcagtcactactagtaactacgccaactgggtccagcagaccccaggccaggctccgcgcggactcatcggcggcacagacaagcgcgctcctggggtccctgatcgcttctctggctccctgcttggggacaaagctgccctcaccatcacgggggcccaggcagaggatgaagctgattattactgtgcgctgtggtacagtaaccattgggtgttcggcggagggaccaagctgaccgtccta

SEQ ID NO: 346 - protein, 109 aa, Artificial Sequence
  Description of Artificial Sequence: Synthetic Light chain variable region amino acid sequence
QTVVTQEPSLSVSPGGTVTLTCGSSTGAVTTSNYANWVQQTPGQAPRGLIGGTDKRAPGVPDRFSGSLLGDKAALTITGAQAEDEADYYCALWYSNHWVFGGGTKLTVL

SEQ ID NO: 347 - protein, 14 aa, Artificial Sequence
  Description of Artificial Sequence: Synthetic Light chain variable region CDR L1 amino acid sequence
GSSTGAVTTSNYAN

SEQ ID NO: 348 - DNA, 42 bp, Artificial Sequence; identical to SEQ ID NO: 204
  Description of Artificial Sequence: Synthetic Light chain variable region CDR L1 nucleic acid sequence

SEQ ID NO: 349 - protein, 7 aa, Artificial Sequence
  Description of Artificial Sequence: Synthetic Light chain variable region CDR L2 amino acid sequence
GTDKRAP

SEQ ID NO: 350 - DNA, 21 bp, Artificial Sequence
  Description of Artificial Sequence: Synthetic Light chain variable region CDR L2 nucleic acid sequence
ggcacagacaagcgcgctcct

SEQ ID NO: 351 - protein, 9 aa, Artificial Sequence
  Description of Artificial Sequence: Synthetic Light chain variable region CDR L3 amino acid sequence
ALWYSNHWV

SEQ ID NO: 352 - DNA, 27 bp, Artificial Sequence
  Description of Artificial Sequence: Synthetic Light chain variable region CDR L3 nucleic acid sequence
gcgctgtggtacagtaaccattgggtg

SEQ ID NO: 353 - DNA, 375 bp, Artificial Sequence; identical to SEQ ID NO: 17
  Description of Artificial Sequence: Synthetic Heavy chain variable region nucleic acid sequence

SEQ ID NO: 354 - protein, 125 aa, Artificial Sequence; identical to SEQ ID NO: 18
  Description of Artificial Sequence: Synthetic Heavy chain variable region amino acid sequence

SEQ ID NO: 355 - protein, 9 aa, Artificial Sequence
  Description of Artificial Sequence: Synthetic Heavy chain variable region CDR H1 amino acid sequence
FTFDTYAMN

SEQ ID NO: 356 - DNA, 27 bp, Artificial Sequence
  Description of Artificial Sequence: Synthetic Heavy chain variable region CDR H1 nucleic acid sequence
ttcacctttgacacatatgccatgaat

SEQ ID NO: 357 - protein, 19 aa, Artificial Sequence
  Description of Artificial Sequence: Synthetic Heavy chain variable region CDR H2 amino acid sequence
RIRSKYNNYATYYADSVKD

SEQ ID NO: 358 - DNA, 57 bp, Artificial Sequence; identical to SEQ ID NO: 6
  Description of Artificial Sequence: Synthetic Heavy chain variable region CDR H2 nucleic acid sequence

SEQ ID NO: 359 - protein, 16 aa, Artificial Sequence
  Description of Artificial Sequence: Synthetic Heavy chain variable region CDR H3 amino acid sequence
VRHGNFGNGYVSWFAH

SEQ ID NO: 360 - DNA, 48 bp, Artificial Sequence; identical to SEQ ID NO: 24
  Description of Artificial Sequence: Synthetic Heavy chain variable region CDR H3 nucleic acid sequence

SEQ ID NO: 361 - DNA, 327 bp, Artificial Sequence
  Description of Artificial Sequence: Synthetic Light chain variable region nucleic acid sequence
cagactgtggtgacccaggagccatcgctctcagtgtcccctggagggacagtcacactcacttgtggatcaagcgctggcgcagtcactactagtaactacgccaactgggtccagcagaccccaggccaggctccacgcggactcatcggcggcacagacaagcgcgctcctggggtccctgatcgcttctctggctccctgcttggggacaaagctgccctcatcatcacgggggcccaggcagatgatgaagctgattattactgtgcgctgtggtacagtaacctttgggtgttcggcggagggaccaagctgaccgtccta

SEQ ID NO: 362 - protein, 109 aa, Artificial Sequence
  Description of Artificial Sequence: Synthetic Light chain variable region amino acid sequence
QTVVTQEPSLSVSPGGTVTLTCGSSAGAVTTSNYANWVQQTPGQAPRGLIGGTDKRAPGVPDRFSGSLLGDKAALIITGAQADDEADYYCALWYSNLWVFGGGTKLTVL

SEQ ID NO: 363 - protein, 14 aa, Artificial Sequence
  Description of Artificial Sequence: Synthetic Light chain variable region CDR L1 amino acid sequence
GSSAGAVTTSNYAN

SEQ ID NO: 364 - DNA, 42 bp, Artificial Sequence; identical to SEQ ID NO: 236
  Description of Artificial Sequence: Synthetic Light chain variable region CDR L1 nucleic acid sequence

SEQ ID NO: 365 - protein, 7 aa, Artificial Sequence
  Description of Artificial Sequence: Synthetic Light chain variable region CDR L2 amino acid sequence
GTDKRAP

SEQ ID NO: 366 - DNA, 21 bp, Artificial Sequence
  Description of Artificial Sequence: Synthetic Light chain variable region CDR L2 nucleic acid sequence
ggcacagacaagcgcgctcct

SEQ ID NO: 367 - protein, 9 aa, Artificial Sequence
  Description of Artificial Sequence: Synthetic Light chain variable region CDR L3 amino acid sequence
ALWYSNLWV

SEQ ID NO: 368 - DNA, 27 bp, Artificial Sequence
  Description of Artificial Sequence: Synthetic Light chain variable region CDR L3 nucleic acid sequence
gcgctgtggtacagtaacctttgggtg

SEQ ID NO: 369 - DNA, 375 bp, Artificial Sequence; identical to SEQ ID NO: 17
  Description of Artificial Sequence: Synthetic Heavy chain variable region nucleic acid sequence

SEQ ID NO: 370 - protein, 125 aa, Artificial Sequence; identical to SEQ ID NO: 18
  Description of Artificial Sequence: Synthetic Heavy chain variable region amino acid sequence

SEQ ID NO: 371 - protein, 9 aa, Artificial Sequence
  Description of Artificial Sequence: Synthetic Heavy chain variable region CDR H1 amino acid sequence
FTFDTYAMN

SEQ ID NO: 372 - DNA, 27 bp, Artificial Sequence
  Description of Artificial Sequence: Synthetic Heavy chain variable region CDR H1 nucleic acid sequence
ttcacctttgacacatatgccatgaat

SEQ ID NO: 373 - protein, 19 aa, Artificial Sequence
  Description of Artificial Sequence: Synthetic Heavy chain variable region CDR H2 amino acid sequence
RIRSKYNNYATYYADSVKD

SEQ ID NO: 374 - DNA, 57 bp, Artificial Sequence; identical to SEQ ID NO: 6
  Description of Artificial Sequence: Synthetic Heavy chain variable region CDR H2 nucleic acid sequence

SEQ ID NO: 375 - protein, 16 aa, Artificial Sequence
  Description of Artificial Sequence: Synthetic Heavy chain variable region CDR H3 amino acid sequence
VRHGNFGNGYVSWFAH

SEQ ID NO: 376 - DNA, 48 bp, Artificial Sequence; identical to SEQ ID NO: 24
  Description of Artificial Sequence: Synthetic Heavy chain variable region CDR H3 nucleic acid sequence

SEQ ID NO: 377 - DNA, 327 bp, Artificial Sequence
  Description of Artificial Sequence: Synthetic Light chain variable region nucleic acid sequence
cagactgtggtgacccaggagccatcgctctcagtgtcccctggagggacagtcacactcacttgtggatcaagcgctggcgcagtcactactagtaactacgccaactgggtccagcagaccccaggccaggctccacgcggactcatcggcggcacagacaagcgcgctcctggggtccctgatcgcttctctggctccctgcttggggacaaagctgccctcaccatcacgggggcccaggcagatgatgaagctgattattactgtgcgctgtggtacaataacctttgggtgttcggcggagggaccaagctgaccgtccta

SEQ ID NO: 378 - protein, 109 aa, Artificial Sequence
  Description of Artificial Sequence: Synthetic Light chain variable region amino acid sequence
QTVVTQEPSLSVSPGGTVTLTCGSSAGAVTTSNYANWVQQTPGQAPRGLIGGTDKRAPGVPDRFSGSLLGDKAALTITGAQADDEADYYCALWYNNLWVFGGGTKLTVL

SEQ ID NO: 379 - protein, 14 aa, Artificial Sequence
  Description of Artificial Sequence: Synthetic Light chain variable region CDR L1 amino acid sequence
GSSAGAVTTSNYAN

SEQ ID NO: 380 - DNA, 42 bp, Artificial Sequence; identical to SEQ ID NO: 236
  Description of Artificial Sequence: Synthetic Light chain variable region CDR L1 nucleic acid sequence

SEQ ID NO: 381 - protein, 7 aa, Artificial Sequence
  Description of Artificial Sequence: Synthetic Light chain variable region CDR L2 amino acid sequence
GTDKRAP

SEQ ID NO: 382 - DNA, 21 bp, Artificial Sequence
  Description of Artificial Sequence: Synthetic Light chain variable region CDR L2 nucleic acid sequence
ggcacagacaagcgcgctcct

SEQ ID NO: 383 - protein, 9 aa, Artificial Sequence
  Description of Artificial Sequence: Synthetic Light chain variable region CDR L3 amino acid sequence
ALWYNNLWV

SEQ ID NO: 384 - DNA, 27 bp, Artificial Sequence
  Description of Artificial Sequence: Synthetic Light chain variable region CDR L3 nucleic acid sequence
gcgctgtggtacaataacctttgggtg

SEQ ID NO: 385 - DNA, 375 bp, Artificial Sequence; identical to SEQ ID NO: 145
  Description of Artificial Sequence: Synthetic Heavy chain variable region nucleic acid sequence

SEQ ID NO: 386 - protein, 125 aa, Artificial Sequence; identical to SEQ ID NO: 146
  Description of Artificial Sequence: Synthetic Heavy chain variable region amino acid sequence

SEQ ID NO: 387 - protein, 9 aa, Artificial Sequence
  Description of Artificial Sequence: Synthetic Heavy chain variable region CDR H1 amino acid sequence
FTFDTYAMN

SEQ ID NO: 388 - DNA, 27 bp, Artificial Sequence
  Description of Artificial Sequence: Synthetic Heavy chain variable region CDR H1 nucleic acid sequence
ttcacctttgacacatatgccatgaat

SEQ ID NO: 389 - protein, 19 aa, Artificial Sequence
  Description of Artificial Sequence: Synthetic Heavy chain variable region CDR H2 amino acid sequence
RIRSKYNNYATYYADSVKD

SEQ ID NO: 390 - DNA, 57 bp, Artificial Sequence; identical to SEQ ID NO: 6
  Description of Artificial Sequence: Synthetic Heavy chain variable region CDR H2 nucleic acid sequence

SEQ ID NO: 391 - protein, 16 aa, Artificial Sequence
  Description of Artificial Sequence: Synthetic Heavy chain variable region CDR H3 amino acid sequence
VRHSNFGNSYVSWFAH

SEQ ID NO: 392 - DNA, 48 bp, Artificial Sequence; identical to SEQ ID NO: 152
  Description of Artificial Sequence: Synthetic Heavy chain variable region CDR H3 nucleic acid sequence

SEQ ID NO: 393 - DNA, 327 bp, Artificial Sequence; identical to SEQ ID NO: 361
  Description of Artificial Sequence: Synthetic Light chain variable region nucleic acid sequence

SEQ ID NO: 394 - protein, 109 aa, Artificial Sequence; identical to SEQ ID NO: 362
  Description of Artificial Sequence: Synthetic Light chain variable region amino acid sequence

SEQ ID NO: 395 - protein, 14 aa, Artificial Sequence
  Description of Artificial Sequence: Synthetic Light chain variable region CDR L1 amino acid sequence
GSSAGAVTTSNYAN

SEQ ID NO: 396 - DNA, 42 bp, Artificial Sequence; identical to SEQ ID NO: 236
  Description of Artificial Sequence: Synthetic Light chain variable region CDR L1 nucleic acid sequence

SEQ ID NO: 397 - protein, 7 aa, Artificial Sequence
  Description of Artificial Sequence: Synthetic Light chain variable region CDR L2 amino acid sequence
GTDKRAP

SEQ ID NO: 398 - DNA, 21 bp, Artificial Sequence
  Description of Artificial Sequence: Synthetic Light chain variable region CDR L2 nucleic acid sequence
ggcacagacaagcgcgctcct

SEQ ID NO: 399 - protein, 9 aa, Artificial Sequence
  Description of Artificial Sequence: Synthetic Light chain variable region CDR L3 amino acid sequence
ALWYSNLWV

SEQ ID NO: 400 - DNA, 27 bp, Artificial Sequence
  Description of Artificial Sequence: Synthetic Light chain variable region CDR L3 nucleic acid sequence
gcgctgtggtacagtaacctttgggtg

SEQ ID NO: 401 - DNA, 375 bp, Artificial Sequence; identical to SEQ ID NO: 145
  Description of Artificial Sequence: Synthetic Heavy chain variable region nucleic acid sequence

SEQ ID NO: 402 - protein, 125 aa, Artificial Sequence; identical to SEQ ID NO: 146
  Description of Artificial Sequence: Synthetic Heavy chain variable region amino acid sequence

SEQ ID NO: 403 - protein, 9 aa, Artificial Sequence
  Description of Artificial Sequence: Synthetic Heavy chain variable region CDR H1 amino acid sequence
FTFDTYAMN

SEQ ID NO: 404 - DNA, 27 bp, Artificial Sequence
  Description of Artificial Sequence: Synthetic Heavy chain variable region CDR H1 nucleic acid sequence
ttcacctttgacacatatgccatgaat

SEQ ID NO: 405 - protein, 19 aa, Artificial Sequence
  Description of Artificial Sequence: Synthetic Heavy chain variable region CDR H2 amino acid sequence
RIRSKYNNYATYYADSVKD

SEQ ID NO: 406 - DNA, 57 bp, Artificial Sequence; identical to SEQ ID NO: 6
  Description of Artificial Sequence: Synthetic Heavy chain variable region CDR H2 nucleic acid sequence

SEQ ID NO: 407 - protein, 16 aa, Artificial Sequence
  Description of Artificial Sequence: Synthetic Heavy chain variable region CDR H3 amino acid sequence
VRHSNFGNSYVSWFAH

SEQ ID NO: 408 - DNA, 48 bp, Artificial Sequence; identical to SEQ ID NO: 152
  Description of Artificial Sequence: Synthetic Heavy chain variable region CDR H3 nucleic acid sequence

SEQ ID NO: 409 - DNA, 327 bp, Artificial Sequence; identical to SEQ ID NO: 377
  Description of Artificial Sequence: Synthetic Light chain variable region nucleic acid sequence

SEQ ID NO: 410 - protein, 109 aa, Artificial Sequence; identical to SEQ ID NO: 378
  Description of Artificial Sequence: Synthetic Light chain variable region amino acid sequence

SEQ ID NO: 411 - protein, 14 aa, Artificial Sequence
  Description of Artificial Sequence: Synthetic Light chain variable region CDR L1 amino acid sequence
GSSAGAVTTSNYAN

SEQ ID NO: 412 - DNA, 42 bp, Artificial Sequence; identical to SEQ ID NO: 236
  Description of Artificial Sequence: Synthetic Light chain variable region CDR L1 nucleic acid sequence

SEQ ID NO: 413 - protein, 7 aa, Artificial Sequence
  Description of Artificial Sequence: Synthetic Light chain variable region CDR L2 amino acid sequence
GTDKRAP

SEQ ID NO: 414 - DNA, 21 bp, Artificial Sequence
  Description of Artificial Sequence: Synthetic Light chain variable region CDR L2 nucleic acid sequence
ggcacagacaagcgcgctcct

SEQ ID NO: 415 - protein, 9 aa, Artificial Sequence
  Description of Artificial Sequence: Synthetic Light chain variable region CDR L3 amino acid sequence
ALWYNNLWV

SEQ ID NO: 416 - DNA, 27 bp, Artificial Sequence
  Description of Artificial Sequence: Synthetic Light chain variable region CDR L3 nucleic acid sequence
gcgctgtggtacaataacctttgggtg

SEQ ID NO: 417 - DNA, 375 bp, Artificial Sequence
  Description of Artificial Sequence: Synthetic Heavy chain variable region nucleic acid sequence
gaggtgcagctgttggagtctgggggaggcttggtacagcctggggggtccctgagactctcctgtgcagcctctggattcacctttgacgcttatgccatgaattgggttcgccaggctccagggaaggggctggagtgggtcgcaaggattagatccaagtataacgattacgctacatactacgcagactccgtgaaggatcggttcaccatctccagagacgattccaagagcacgctgtatctgcaaatgaacagcctgagagccgaggacacggcggtgtactactgcgtcaggcacggtaacttcgggaacggttacgtatcctggtttgctcattggggccaaggaaccctggtcaccgtctcctca

SEQ ID NO: 418 - protein, 125 aa, Artificial Sequence
  Description of Artificial Sequence: Synthetic Heavy chain variable region amino acid sequence
EVQLLESGGGLVQPGGSLRLSCAASGFTFDAYAMNWVRQAPGKGLEWVARIRSKYNDYATYYADSVKDRFTISRDDSKSTLYLQMNSLRAEDTAVYYCVRHGNFGNGYVSWFAHWGQGTLVTVSS

SEQ ID NO: 419 - protein, 9 aa, Artificial Sequence
  Description of Artificial Sequence: Synthetic Heavy chain variable region CDR H1 amino acid sequence
FTFDAYAMN

SEQ ID NO: 420 - DNA, 27 bp, Artificial Sequence
  Description of Artificial Sequence: Synthetic Heavy chain variable region CDR H1 nucleic acid sequence
ttcacctttgacgcttatgccatgaat

SEQ ID NO: 421 - protein, 19 aa, Artificial Sequence
  Description of Artificial Sequence: Synthetic Heavy chain variable region CDR H2 amino acid sequence
RIRSKYNDYATYYADSVKD

SEQ ID NO: 422 - DNA, 57 bp, Artificial Sequence
  Description of Artificial Sequence: Synthetic Heavy chain variable region CDR H2 nucleic acid sequence
aggattagatccaagtataacgattacgctacatactacgcagactccgtgaaggat

SEQ ID NO: 423 - protein, 16 aa, Artificial Sequence
  Description of Artificial Sequence: Synthetic Heavy chain variable region CDR H3 amino acid sequence
VRHGNFGNGYVSWFAH

SEQ ID NO: 424 - DNA, 48 bp, Artificial Sequence; identical to SEQ ID NO: 24
  Description of Artificial Sequence: Synthetic Heavy chain variable region CDR H3 nucleic acid sequence

SEQ ID NO: 425 - DNA, 327 bp, Artificial Sequence
  Description of Artificial Sequence: Synthetic Light chain variable region nucleic acid sequence
cagactgtggtgacccaggagccatcgctctcagtgtcccctggagggacagtcacactcacttgtggatcaagcactggcgcagtcactactagtaactacgccaactgggtccagcagaccccaggccaggctccgcgcggactcatcggcggcacagacaagcgcgctcctggggtccctgatcgcttctctggctccctgcttggggacaaagctgccctcaccatcacgggggcccaggcagaggatgaagctgattattactgtgcgctgtggtacagtgatctgtgggtgttcggcggagggaccaagctgaccgtccta

SEQ ID NO: 426 - protein, 109 aa, Artificial Sequence
  Description of Artificial Sequence: Synthetic Light chain variable region amino acid sequence
QTVVTQEPSLSVSPGGTVTLTCGSSTGAVTTSNYANWVQQTPGQAPRGLIGGTDKRAPGVPDRFSGSLLGDKAALTITGAQAEDEADYYCALWYSDLWVFGGGTKLTVL

SEQ ID NO: 427 - protein, 14 aa, Artificial Sequence
  Description of Artificial Sequence: Synthetic Light chain variable region CDR L1 amino acid sequence
GSSTGAVTTSNYAN

SEQ ID NO: 428 - DNA, 42 bp, Artificial Sequence; identical to SEQ ID NO: 204
  Description of Artificial Sequence: Synthetic Light chain variable region CDR L1 nucleic acid sequence

SEQ ID NO: 429 - protein, 7 aa, Artificial Sequence
  Description of Artificial Sequence: Synthetic Light chain variable region CDR L2 amino acid sequence
GTDKRAP

SEQ ID NO: 430 - DNA, 21 bp, Artificial Sequence
  Description of Artificial Sequence: Synthetic Light chain variable region CDR L2 nucleic acid sequence
ggcacagacaagcgcgctcct

SEQ ID NO: 431 - protein, 9 aa, Artificial Sequence
  Description of Artificial Sequence: Synthetic Light chain variable region CDR L3 amino acid sequence
ALWYSDLWV

SEQ ID NO: 432 - DNA, 27 bp, Artificial Sequence
  Description of Artificial Sequence: Synthetic Light chain variable region CDR L3 nucleic acid sequence
gcgctgtggtacagtgatctgtgggtg

SEQ ID NO: 433 - DNA, 375 bp, Artificial Sequence; identical to SEQ ID NO: 17
  Description of Artificial Sequence: Synthetic Heavy chain variable region nucleic acid sequence

SEQ ID NO: 434 - protein, 125 aa, Artificial Sequence; identical to SEQ ID NO: 18
  Description of Artificial Sequence: Synthetic Heavy chain variable region amino acid sequence

SEQ ID NO: 435 - protein, 9 aa, Artificial Sequence
  Description of Artificial Sequence: Synthetic Heavy chain variable region CDR H1 amino acid sequence
FTFDTYAMN

SEQ ID NO: 436 - DNA, 27 bp, Artificial Sequence
  Description of Artificial Sequence: Synthetic Heavy chain variable region CDR H1 nucleic acid sequence
ttcacctttgacacatatgccatgaat

SEQ ID NO: 437 - protein, 19 aa, Artificial Sequence
  Description of Artificial Sequence: Synthetic Heavy chain variable region CDR H2 amino acid sequence
RIRSKYNNYATYYADSVKD

SEQ ID NO: 438 - DNA, 57 bp, Artificial Sequence; identical to SEQ ID NO: 6
  Description of Artificial Sequence: Synthetic Heavy chain variable region CDR H2 nucleic acid sequence

SEQ ID NO: 439 - protein, 16 aa, Artificial Sequence
  Description of Artificial Sequence: Synthetic Heavy chain variable region CDR H3 amino acid sequence
VRHGNFGNGYVSWFAH

SEQ ID NO: 440 - DNA, 48 bp, Artificial Sequence; identical to SEQ ID NO: 24
  Description of Artificial Sequence: Synthetic Heavy chain variable region CDR H3 nucleic acid sequence

SEQ ID NO: 441 - DNA, 327 bp, Artificial Sequence; identical to SEQ ID NO: 425
  Description of Artificial Sequence: Synthetic Light chain variable region nucleic acid sequence

SEQ ID NO: 442 - protein, 109 aa, Artificial Sequence; identical to SEQ ID NO: 426
  Description of Artificial Sequence: Synthetic Light chain variable region amino acid sequence

SEQ ID NO: 443 - protein, 14 aa, Artificial Sequence
  Description of Artificial Sequence: Synthetic Light chain variable region CDR L1 amino acid sequence
GSSTGAVTTSNYAN

SEQ ID NO: 444 - DNA, 42 bp, Artificial Sequence; identical to SEQ ID NO: 204
  Description of Artificial Sequence: Synthetic Light chain variable region CDR L1 nucleic acid sequence

SEQ ID NO: 445 - protein, 7 aa, Artificial Sequence
  Description of Artificial Sequence: Synthetic Light chain variable region CDR L2 amino acid sequence
GTDKRAP

SEQ ID NO: 446 - DNA, 21 bp, Artificial Sequence
  Description of Artificial Sequence: Synthetic Light chain variable region CDR L2 nucleic acid sequence
ggcacagacaagcgcgctcct

SEQ ID NO: 447 - protein, 9 aa, Artificial Sequence
  Description of Artificial Sequence: Synthetic Light chain variable region CDR L3 amino acid sequence
ALWYSDLWV

SEQ ID NO: 448 - DNA, 27 bp, Artificial Sequence
  Description of Artificial Sequence: Synthetic Light chain variable region CDR L3 nucleic acid sequence
gcgctgtggtacagtgatctgtgggtg

SEQ ID NO: 449 - DNA, 375 bp, Artificial Sequence
  Description of Artificial Sequence: Synthetic Heavy chain variable region nucleic acid sequence
gaggtgcagctgttggagtctgggggaggcttggtacagcctggggggtccctgagactctcctgtgcagcctctggattcacctttgacacatatgccatgaattgggttcgccaggctccagggaaggggctggagtgggtcgcaaggattagatccaagtataacaattacgctacatactacgcagactccgtgaaggatcggttcaccatctccagagacgattccaagagcacgctgtatctgcaaatggaaagcctgagagccgaggacacggcggtgtactactgcgtcaggcacggtaacttcgggaacggttacgtatcctggtttgctcattggggccaaggaaccctggtcaccgtctcctca

SEQ ID NO: 450 - protein, 125 aa, Artificial Sequence
  Description of Artificial Sequence: Synthetic Heavy chain variable region amino acid sequence
EVQLLESGGGLVQPGGSLRLSCAASGFTFDTYAMNWVRQAPGKGLEWVARIRSKYNNYATYYADSVKDRFTISRDDSKSTLYLQMESLRAEDTAVYYCVRHGNFGNGYVSWFAHWGQGTLVTVSS

SEQ ID NO: 451 - protein, 9 aa, Artificial Sequence
  Description of Artificial Sequence: Synthetic Heavy chain variable region CDR H1 amino acid sequence
FTFDTYAMN

SEQ ID NO: 452 - DNA, 27 bp, Artificial Sequence
  Description of Artificial Sequence: Synthetic Heavy chain variable region CDR H1 nucleic acid sequence
ttcacctttgacacatatgccatgaat

SEQ ID NO: 453 - protein, 19 aa, Artificial Sequence
  Description of Artificial Sequence: Synthetic Heavy chain variable region CDR H2 amino acid sequence
RIRSKYNNYATYYADSVKD

SEQ ID NO: 454 - DNA, 57 bp, Artificial Sequence; identical to SEQ ID NO: 6
  Description of Artificial Sequence: Synthetic Heavy chain variable region CDR H2 nucleic acid sequence

SEQ ID NO: 455 - protein, 16 aa, Artificial Sequence
  Description of Artificial Sequence: Synthetic Heavy chain variable region CDR H3 amino acid sequence
VRHGNFGNGYVSWFAH

SEQ ID NO: 456 - DNA, 48 bp, Artificial Sequence; identical to SEQ ID NO: 24
  Description of Artificial Sequence: Synthetic Heavy chain variable region CDR H3 nucleic acid sequence

SEQ ID NO: 457 - DNA, 327 bp, Artificial Sequence; identical to SEQ ID NO: 345
  Description of Artificial Sequence: Synthetic Light chain variable region nucleic acid sequence

SEQ ID NO: 458 - protein, 109 aa, Artificial Sequence; identical to SEQ ID NO: 346
  Description of Artificial Sequence: Synthetic Light chain variable region amino acid sequence

SEQ ID NO: 459 - protein, 14 aa, Artificial Sequence
  Description of Artificial Sequence: Synthetic Light chain variable region CDR L1 amino acid sequence
GSSTGAVTTSNYAN

SEQ ID NO: 460 - DNA, 42 bp, Artificial Sequence; identical to SEQ ID NO: 204
  Description of Artificial Sequence: Synthetic Light chain variable region CDR L1 nucleic acid sequence

SEQ ID NO: 461 - protein, 7 aa, Artificial Sequence
  Description of Artificial Sequence: Synthetic Light chain variable region CDR L2 amino acid sequence
GTDKRAP

SEQ ID NO: 462 - DNA, 21 bp, Artificial Sequence
  Description of Artificial Sequence: Synthetic Light chain variable region CDR L2 nucleic acid sequence
ggcacagacaagcgcgctcct

SEQ ID NO: 463 - protein, 9 aa, Artificial Sequence
  Description of Artificial Sequence: Synthetic Light chain variable region CDR L3 amino acid sequence
ALWYSNHWV

SEQ ID NO: 464 - DNA, 27 bp, Artificial Sequence
  Description of Artificial Sequence: Synthetic Light chain variable region CDR L3 nucleic acid sequence
gcgctgtggtacagtaaccattgggtg

SEQ ID NO: 465 - DNA, 375 bp, Artificial Sequence
  Description of Artificial Sequence: Synthetic Heavy chain variable region nucleic acid sequence
gaggtgcagctgttggagtctgggggaggcttggtacagcctggggggtccctgagactctcctgtgcagcctctggattcacctttgacacatatgccatgaattgggttcgccaggctccagggaaggggctggagtgggtcgcaaggattagatccaagtataacaattacgctacatactacgcagactccgtgaaggatcggttcaccatctccagagacgattccaagagcacgctgtatctgcaaatgaacagcctgagagccgaggacacggcggtgtactactgcgtcaggcacggtaacttcggggaaggttacgtatcctggtttgctcattggggccaaggaaccctggtcaccgtctcctca

SEQ ID NO: 466 - protein, 125 aa, Artificial Sequence
  Description of Artificial Sequence: Synthetic Heavy chain variable region amino acid sequence
EVQLLESGGGLVQPGGSLRLSCAASGFTFDTYAMNWVRQAPGKGLEWVARIRSKYNNYATYYADSVKDRFTISRDDSKSTLYLQMNSLRAEDTAVYYCVRHGNFGEGYVSWFAHWGQGTLVTVSS

SEQ ID NO: 467 - protein, 9 aa, Artificial Sequence
  Description of Artificial Sequence: Synthetic Heavy chain variable region CDR H1 amino acid sequence
FTFDTYAMN

SEQ ID NO: 468 - DNA, 27 bp, Artificial Sequence
  Description of Artificial Sequence: Synthetic Heavy chain variable region CDR H1 nucleic acid sequence
ttcacctttgacacatatgccatgaat

SEQ ID NO: 469 - protein, 19 aa, Artificial Sequence
  Description of Artificial Sequence: Synthetic Heavy chain variable region CDR H2 amino acid sequence
RIRSKYNNYATYYADSVKD

SEQ ID NO: 470 - DNA, 57 bp, Artificial Sequence; identical to SEQ ID NO: 6
  Description of Artificial Sequence: Synthetic Heavy chain variable region CDR H2 nucleic acid sequence

SEQ ID NO: 471 - protein, 16 aa, Artificial Sequence
  Description of Artificial Sequence: Synthetic Heavy chain variable region CDR H3 amino acid sequence
VRHGNFGEGYVSWFAH

SEQ ID NO: 472 - DNA, 48 bp, Artificial Sequence
  Description of Artificial Sequence: Synthetic Heavy chain variable region CDR H3 nucleic acid sequence
gtcaggcacggtaacttcggggaaggttacgtatcctggtttgctcat

SEQ ID NO: 473 - DNA, 327 bp, Artificial Sequence; identical to SEQ ID NO: 345
  Description of Artificial Sequence: Synthetic Light chain variable region nucleic acid sequence

SEQ ID NO: 474 - protein, 109 aa, Artificial Sequence; identical to SEQ ID NO: 346
  Description of Artificial Sequence: Synthetic Light chain variable region amino acid sequence

SEQ ID NO: 475 - protein, 14 aa, Artificial Sequence
  Description of Artificial Sequence: Synthetic Light chain variable region CDR L1 amino acid sequence
GSSTGAVTTSNYAN

SEQ ID NO: 476 - DNA, 42 bp, Artificial Sequence; identical to SEQ ID NO: 204
  Description of Artificial Sequence: Synthetic Light chain variable region CDR L1 nucleic acid sequence

SEQ ID NO: 477 - protein, 7 aa, Artificial Sequence
  Description of Artificial Sequence: Synthetic Light chain variable region CDR L2 amino acid sequence
GTDKRAP

SEQ ID NO: 478 - DNA, 21 bp, Artificial Sequence
  Description of Artificial Sequence: Synthetic Light chain variable region CDR L2 nucleic acid sequence
ggcacagacaagcgcgctcct

SEQ ID NO: 479 - protein, 9 aa, Artificial Sequence
  Description of Artificial Sequence: Synthetic Light chain variable region CDR L3 amino acid sequence
ALWYSNHWV

SEQ ID NO: 480 - DNA, 27 bp, Artificial Sequence
  Description of Artificial Sequence: Synthetic Light chain variable region CDR L3 nucleic acid sequence
gcgctgtggtacagtaaccattgggtg

SEQ ID NO: 481 - DNA, 375 bp, Artificial Sequence
  Description of Artificial Sequence: Synthetic Heavy chain variable region nucleic acid sequence
gaggtgcagctgttggagtctgggggaggcttggtacagcctggggggtccctgagactctcctgtgcagcctctggattcacctttgacacatatgccatgaattgggttcgccaggctccagggaaggggctggagtgggtcgcaaggattagatccaagtataacaattacgctacatactacgcagactccgtgaaggatcggttcaccatctccagagacgattccaagagcacgctgtatctgcaaatggaaagcctgagagccgaggacacggcggtgtactactgcgtcaggcacggtaacttcggggaaggttacgtatcctggtttgctcattggggccaaggaaccctggtcaccgtctcctca

SEQ ID NO: 482 - protein, 125 aa, Artificial Sequence
  Description of Artificial Sequence: Synthetic Heavy chain variable region amino acid sequence
EVQLLESGGGLVQPGGSLRLSCAASGFTFDTYAMNWVRQAPGKGLEWVARIRSKYNNYATYYADSVKDRFTISRDDSKSTLYLQMESLRAEDTAVYYCVRHGNFGEGYVSWFAHWGQGTLVTVSS

SEQ ID NO: 483 - protein, 9 aa, Artificial Sequence
  Description of Artificial Sequence: Synthetic Heavy chain variable region CDR H1 amino acid sequence
FTFDTYAMN

SEQ ID NO: 484 - DNA, 27 bp, Artificial Sequence
  Description of Artificial Sequence: Synthetic Heavy chain variable region CDR H1 nucleic acid sequence
ttcacctttgacacatatgccatgaat

SEQ ID NO: 485 - protein, 19 aa, Artificial Sequence
  Description of Artificial Sequence: Synthetic Heavy chain variable region CDR H2 amino acid sequence
RIRSKYNNYATYYADSVKD

SEQ ID NO: 486 - DNA, 57 bp, Artificial Sequence; identical to SEQ ID NO: 6
  Description of Artificial Sequence: Synthetic Heavy chain variable region CDR H2 nucleic acid sequence

SEQ ID NO: 487 - protein, 16 aa, Artificial Sequence
  Description of Artificial Sequence: Synthetic Heavy chain variable region CDR H3 amino acid sequence
VRHGNFGEGYVSWFAH

SEQ ID NO: 488 - DNA, 48 bp, Artificial Sequence; identical to SEQ ID NO: 472
  Description of Artificial Sequence: Synthetic Heavy chain variable region CDR H3 nucleic acid sequence

SEQ ID NO: 489 - DNA, 327 bp, Artificial Sequence; identical to SEQ ID NO: 345
  Description of Artificial Sequence: Synthetic Light chain variable region nucleic acid sequence

SEQ ID NO: 490 - protein, 109 aa, Artificial Sequence; identical to SEQ ID NO: 346
  Description of Artificial Sequence: Synthetic Light chain variable region amino acid sequence

SEQ ID NO: 491 - protein, 14 aa, Artificial Sequence
  Description of Artificial Sequence: Synthetic Light chain variable region CDR L1 amino acid sequence
GSSTGAVTTSNYAN

SEQ ID NO: 492 - DNA, 42 bp, Artificial Sequence; identical to SEQ ID NO: 204
  Description of Artificial Sequence: Synthetic Light chain variable region CDR L1 nucleic acid sequence

SEQ ID NO: 493 - protein, 7 aa, Artificial Sequence
  Description of Artificial Sequence: Synthetic Light chain variable region CDR L2 amino acid sequence
GTDKRAP

SEQ ID NO: 494 - DNA, 21 bp, Artificial Sequence
  Description of Artificial Sequence: Synthetic Light chain variable region CDR L2 nucleic acid sequence
ggcacagacaagcgcgctcct

SEQ ID NO: 495 - protein, 9 aa, Artificial Sequence
  Description of Artificial Sequence: Synthetic Light chain variable region CDR L3 amino acid sequence
ALWYSNHWV

SEQ ID NO: 496 - DNA, 27 bp, Artificial Sequence
  Description of Artificial Sequence: Synthetic Light chain variable region CDR L3 nucleic acid sequence
gcgctgtggtacagtaaccattgggtg

SEQ ID NO: 497 - DNA, 375 bp, Artificial Sequence
  Description of Artificial Sequence: Synthetic Heavy chain variable region nucleic acid sequence
gaggtgcagctgttggagtctgggggaggcttggtacagcctggggggtccctgagactctcctgtgcagcctctggattcacctttgacacatatgccatgaattgggttcgccaggctccagggaaggggctggagtgggtcgcaaggattagatccaagtataacaattacgctacatactacgcagactccgtgaaggatcggttcaccatctccagagacgattccaagagcacgctgtatctgcaaatgaacgctctgagagccgaggacacggcggtgtactactgcgtcaggcacggtaacttcgggaacggttacgtatcctggtttgctcattggggccaaggaaccctggtcaccgtctcctca

SEQ ID NO: 498 - protein, 125 aa, Artificial Sequence
  Description of Artificial Sequence: Synthetic Heavy chain variable region amino acid sequence
EVQLLESGGGLVQPGGSLRLSCAASGFTFDTYAMNWVRQAPGKGLEWVARIRSKYNNYATYYADSVKDRFTISRDDSKSTLYLQMNALRAEDTAVYYCVRHGNFGNGYVSWFAHWGQGTLVTVSS

SEQ ID NO: 499 - protein, 9 aa, Artificial Sequence
  Description of Artificial Sequence: Synthetic Heavy chain variable region CDR H1 amino acid sequence
FTFDTYAMN

SEQ ID NO: 500 - DNA, 27 bp, Artificial Sequence
  Description of Artificial Sequence: Synthetic Heavy chain variable region CDR H1 nucleic acid sequence
ttcacctttgacacatatgccatgaat

SEQ ID NO: 501 - protein, 19 aa, Artificial Sequence
  Description of Artificial Sequence: Synthetic Heavy chain variable region CDR H2 amino acid sequence
RIRSKYNNYATYYADSVKD

SEQ ID NO: 502 - DNA, 57 bp, Artificial Sequence; identical to SEQ ID NO: 6
  Description of Artificial Sequence: Synthetic Heavy chain variable region CDR H2 nucleic acid sequence

SEQ ID NO: 503 - protein, 16 aa, Artificial Sequence
  Description of Artificial Sequence: Synthetic Heavy chain variable region CDR H3 amino acid sequence
VRHGNFGNGYVSWFAH

SEQ ID NO: 504 - DNA, 48 bp, Artificial Sequence; identical to SEQ ID NO: 24
  Description of Artificial Sequence: Synthetic Heavy chain variable region CDR H3 nucleic acid sequence

SEQ ID NO: 505 - DNA, 327 bp, Artificial Sequence; identical to SEQ ID NO: 345
  Description of Artificial Sequence: Synthetic Light chain variable region nucleic acid sequence

SEQ ID NO: 506 - protein, 109 aa, Artificial Sequence; identical to SEQ ID NO: 346
  Description of Artificial Sequence: Synthetic Light chain variable region amino acid sequence

SEQ ID NO: 507 - protein, 14 aa, Artificial Sequence
  Description of Artificial Sequence: Synthetic Light chain variable region CDR L1 amino acid sequence
GSSTGAVTTSNYAN

SEQ ID NO: 508 - DNA, 42 bp, Artificial Sequence; identical to SEQ ID NO: 204
  Description of Artificial Sequence: Synthetic Light chain variable region CDR L1 nucleic acid sequence

SEQ ID NO: 509 - protein, 7 aa, Artificial Sequence
  Description of Artificial Sequence: Synthetic Light chain variable region CDR L2 amino acid sequence
GTDKRAP

SEQ ID NO: 510 - DNA, 21 bp, Artificial Sequence
  Description of Artificial Sequence: Synthetic Light chain variable region CDR L2 nucleic acid sequence
ggcacagacaagcgcgctcct

SEQ ID NO: 511 - protein, 9 aa, Artificial Sequence
  Description of Artificial Sequence: Synthetic Light chain variable region CDR L3 amino acid sequence
ALWYSNHWV

SEQ ID NO: 512 - DNA, 27 bp, Artificial Sequence
  Description of Artificial Sequence: Synthetic Light chain variable region CDR L3 nucleic acid sequence
gcgctgtggtacagtaaccattgggtg

SEQ ID NO: 513 - DNA, 375 bp, Artificial Sequence
  Description of Artificial Sequence: Synthetic Heavy chain variable region nucleic acid sequence
gaggtgcagctgttggagtctgggggaggcttggtacagcctggggggtccctgagactctcctgtgcagcctctggattcacctttgacacatatgccatgaattgggttcgccaggctccagggaaggggctggagtgggtcgcaaggattagatccaagtataacaattacgctacatactacgcagactccgtgaaggatcggttcaccatctccagagacgattccaagagcacgctgtatctgcaaatgaacagcctgagagccgaggacacggcggtgtactactgcgtcaggcacggtaacttcgggaacgcttacgtatcctggtttgctcattggggccaaggaaccctggtcaccgtctcctca

SEQ ID NO: 514 - protein, 125 aa, Artificial Sequence
  Description of Artificial Sequence: Synthetic Heavy chain variable region amino acid sequence
EVQLLESGGGLVQPGGSLRLSCAASGFTFDTYAMNWVRQAPGKGLEWVARIRSKYNNYATYYADSVKDRFTISRDDSKSTLYLQMNSLRAEDTAVYYCVRHGNFGNAYVSWFAHWGQGTLVTVSS

SEQ ID NO: 515 - protein, 9 aa, Artificial Sequence
  Description of Artificial Sequence: Synthetic Heavy chain variable region CDR H1 amino acid sequence
FTFDTYAMN

SEQ ID NO: 516 - DNA, 27 bp, Artificial Sequence
  Description of Artificial Sequence: Synthetic Heavy chain variable region CDR H1 nucleic acid sequence
ttcacctttgacacatatgccatgaat

SEQ ID NO: 517 - protein, 19 aa, Artificial Sequence
  Description of Artificial Sequence: Synthetic Heavy chain variable region CDR H2 amino acid sequence
RIRSKYNNYATYYADSVKD

SEQ ID NO: 518 - DNA, 57 bp, Artificial Sequence; identical to SEQ ID NO: 6
  Description of Artificial Sequence: Synthetic Heavy chain variable region CDR H2 nucleic acid sequence

SEQ ID NO: 519 - protein, 16 aa, Artificial Sequence
  Description of Artificial Sequence: Synthetic Heavy chain variable region CDR H3 amino acid sequence
VRHGNFGNAYVSWFAH

SEQ ID NO: 520 - DNA, 48 bp, Artificial Sequence
  Description of Artificial Sequence: Synthetic Heavy chain variable region CDR H3 nucleic acid sequence
gtcaggcacggtaacttcgggaacgcttacgtatcctggtttgctcat

SEQ ID NO: 521 - DNA, 327 bp, Artificial Sequence; identical to SEQ ID NO: 345
  Description of Artificial Sequence: Synthetic Light chain variable region nucleic acid sequence

SEQ ID NO: 522 - protein, 109 aa, Artificial Sequence; identical to SEQ ID NO: 346
  Description of Artificial Sequence: Synthetic Light chain variable region amino acid sequence

SEQ ID NO: 523 - protein, 14 aa, Artificial Sequence
  Description of Artificial Sequence: Synthetic Light chain variable region CDR L1 amino acid sequence
GSSTGAVTTSNYAN

SEQ ID NO: 524 - DNA, 42 bp, Artificial Sequence; identical to SEQ ID NO: 204
  Description of Artificial Sequence: Synthetic Light chain variable region CDR L1 nucleic acid sequence

SEQ ID NO: 525 - protein, 7 aa, Artificial Sequence
  Description of Artificial Sequence: Synthetic Light chain variable region CDR L2 amino acid sequence
GTDKRAP

SEQ ID NO: 526 - DNA, 21 bp, Artificial Sequence
  Description of Artificial Sequence: Synthetic Light chain variable region CDR L2 nucleic acid sequence
ggcacagacaagcgcgctcct

SEQ ID NO: 527 - protein, 9 aa, Artificial Sequence
  Description of Artificial Sequence: Synthetic Light chain variable region CDR L3 amino acid sequence
ALWYSNHWV

SEQ ID NO: 528 - DNA, 27 bp, Artificial Sequence
  Description of Artificial Sequence: Synthetic Light chain variable region CDR L3 nucleic acid sequence
gcgctgtggtacagtaaccattgggtg

SEQ ID NO: 529 - DNA, 375 bp, Artificial Sequence
  Description of Artificial Sequence: Synthetic Heavy chain variable region nucleic acid sequence
gaggtgcagctgttggagtctgggggaggcttggtacagcctggggggtccctgagactctcctgtgcagcctctggattcacctttgacacatatgccatgaattgggttcgccaggctccagggaaggggctggagtgggtcgcaaggattagatccaagtataacaattacgctacatactacgcagactccgtgaaggatcggttcaccatctccagagacgattccaagagcacgctgtatctgcaaatgaacgctctgagagccgaggacacggcggtgtactactgcgtcaggcacggtaacttcgggaacgcttacgtatcctggtttgctcattggggccaaggaaccctggtcaccgtctcctca

SEQ ID NO: 530 - protein, 125 aa, Artificial Sequence
  Description of Artificial Sequence: Synthetic Heavy chain variable region amino acid sequence
EVQLLESGGGLVQPGGSLRLSCAASGFTFDTYAMNWVRQAPGKGLEWVARIRSKYNNYATYYADSVKDRFTISRDDSKSTLYLQMNALRAEDTAVYYCVRHGNFGNAYVSWFAHWGQGTLVTVSS

SEQ ID NO: 531 - protein, 9 aa, Artificial Sequence
  Description of Artificial Sequence: Synthetic Heavy chain variable region CDR H1 amino acid sequence
FTFDTYAMN

SEQ ID NO: 532 - DNA, 27 bp, Artificial Sequence
  Description of Artificial Sequence: Synthetic Heavy chain variable region CDR H1 nucleic acid sequence
ttcacctttgacacatatgccatgaat

SEQ ID NO: 533 - protein, 19 aa, Artificial Sequence
  Description of Artificial Sequence: Synthetic Heavy chain variable region CDR H2 amino acid sequence
RIRSKYNNYATYYADSVKD

SEQ ID NO: 534 - DNA, 57 bp, Artificial Sequence; identical to SEQ ID NO: 6
  Description of Artificial Sequence: Synthetic Heavy chain variable region CDR H2 nucleic acid sequence

SEQ ID NO: 535 - protein, 16 aa, Artificial Sequence
  Description of Artificial Sequence: Synthetic Heavy chain variable region CDR H3 amino acid sequence
VRHGNFGNAYVSWFAH

SEQ ID NO: 536 - DNA, 48 bp, Artificial Sequence; identical to SEQ ID NO: 520
  Description of Artificial Sequence: Synthetic Heavy chain variable region CDR H3 nucleic acid sequence

SEQ ID NO: 537 - DNA, 327 bp, Artificial Sequence; identical to SEQ ID NO: 345
  Description of Artificial Sequence: Synthetic Light chain variable region nucleic acid sequence

SEQ ID NO: 538 - protein, 109 aa, Artificial Sequence; identical to SEQ ID NO: 346
  Description of Artificial Sequence: Synthetic Light chain variable region amino acid sequence

SEQ ID NO: 539 - protein, 14 aa, Artificial Sequence
  Description of Artificial Sequence: Synthetic Light chain variable region CDR L1 amino acid sequence
GSSTGAVTTSNYAN

SEQ ID NO: 540 - DNA, 42 bp, Artificial Sequence; identical to SEQ ID NO: 204
  Description of Artificial Sequence: Synthetic Light chain variable region CDR L1 nucleic acid sequence

SEQ ID NO: 541 - protein, 7 aa, Artificial Sequence
  Description of Artificial Sequence: Synthetic Light chain variable region CDR L2 amino acid sequence
GTDKRAP

SEQ ID NO: 542 - DNA, 21 bp, Artificial Sequence
  Description of Artificial Sequence: Synthetic Light chain variable region CDR L2 nucleic acid sequence
ggcacagacaagcgcgctcct

SEQ ID NO: 543 - protein, 9 aa, Artificial Sequence
  Description of Artificial Sequence: Synthetic Light chain variable region CDR L3 amino acid sequence
ALWYSNHWV

SEQ ID NO: 544 - DNA, 27 bp, Artificial Sequence
  Description of Artificial Sequence: Synthetic Light chain variable region CDR L3 nucleic acid sequence
gcgctgtggtacagtaaccattgggtg

SEQ ID NO: 545 - DNA, 375 bp, Artificial Sequence; identical to SEQ ID NO: 17
  Description of Artificial Sequence: Synthetic Heavy chain variable region nucleic acid sequence

SEQ ID NO: 546 - protein, 125 aa, Artificial Sequence; identical to SEQ ID NO: 18
  Description of Artificial Sequence: Synthetic Heavy chain variable region amino acid sequence

SEQ ID NO: 547 - protein, 9 aa, Artificial Sequence
  Description of Artificial Sequence: Synthetic Heavy chain variable region CDR H1 amino acid sequence
FTFDTYAMN

SEQ ID NO: 548 - DNA, 27 bp, Artificial Sequence
  Description of Artificial Sequence: Synthetic Heavy chain variable region CDR H1 nucleic acid sequence
ttcacctttgacacatatgccatgaat

SEQ ID NO: 549 - protein, 19 aa, Artificial Sequence
  Description of Artificial Sequence: Synthetic Heavy chain variable region CDR H2 amino acid sequence
RIRSKYNNYATYYADSVKD

SEQ ID NO: 550 - DNA, 57 bp, Artificial Sequence; identical to SEQ ID NO: 6
  Description of Artificial Sequence: Synthetic Heavy chain variable region CDR H2 nucleic acid sequence

SEQ ID NO: 551 - protein, 16 aa, Artificial Sequence
  Description of Artificial Sequence: Synthetic Heavy chain variable region CDR H3 amino acid sequence
VRHGNFGNGYVSWFAH

SEQ ID NO: 552 - DNA, 48 bp, Artificial Sequence; identical to SEQ ID NO: 24
  Description of Artificial Sequence: Synthetic Heavy chain variable region CDR H3 nucleic acid sequence

SEQ ID NO: 553 - DNA, 327 bp, Artificial Sequence; identical to SEQ ID NO: 345
  Description of Artificial Sequence: Synthetic Light chain variable region nucleic acid sequence

SEQ ID NO: 554 - protein, 109 aa, Artificial Sequence; identical to SEQ ID NO: 346
  Description of Artificial Sequence: Synthetic Light chain variable region amino acid sequence

SEQ ID NO: 555 - protein, 14 aa, Artificial Sequence
  Description of Artificial Sequence: Synthetic Light chain variable region CDR L1 amino acid sequence
GSSTGAVTTSNYAN

SEQ ID NO: 556 - DNA, 42 bp, Artificial Sequence; identical to SEQ ID NO: 204
  Description of Artificial Sequence: Synthetic Light chain variable region CDR L1 nucleic acid sequence

SEQ ID NO: 557 - protein, 7 aa, Artificial Sequence
  Description of Artificial Sequence: Synthetic Light chain variable region CDR L2 amino acid sequence
GTDKRAP

SEQ ID NO: 558 - DNA, 21 bp, Artificial Sequence
  Description of Artificial Sequence: Synthetic Light chain variable region CDR L2 nucleic acid sequence
ggcacagacaagcgcgctcct

SEQ ID NO: 559 - protein, 9 aa, Artificial Sequence
  Description of Artificial Sequence: Synthetic Light chain variable region CDR L3 amino acid sequence
ALWYSNHWV

SEQ ID NO: 560 - DNA, 27 bp, Artificial Sequence
  Description of Artificial Sequence: Synthetic Light chain variable region CDR L3 nucleic acid sequence
gcgctgtggtacagtaaccattgggtg

SEQ ID NO: 561 - DNA, 375 bp, Artificial Sequence; identical to SEQ ID NO: 17
  Description of Artificial Sequence: Synthetic Heavy chain variable region nucleic acid sequence

SEQ ID NO: 562 - protein, 125 aa, Artificial Sequence; identical to SEQ ID NO: 18
  Description of Artificial Sequence: Synthetic Heavy chain variable region amino acid sequence

SEQ ID NO: 563 - protein, 9 aa, Artificial Sequence
  Description of Artificial Sequence: Synthetic Heavy chain variable region CDR H1 amino acid sequence
FTFDTYAMN

SEQ ID NO: 564 - DNA, 27 bp, Artificial Sequence
  Description of Artificial Sequence: Synthetic Heavy chain variable region CDR H1 nucleic acid sequence
ttcacctttgacacatatgccatgaat

SEQ ID NO: 565 - protein, 19 aa, Artificial Sequence
  Description of Artificial Sequence: Synthetic Heavy chain variable region CDR H2 amino acid sequence
RIRSKYNNYATYYADSVKD

SEQ ID NO: 566 - DNA, 57 bp, Artificial Sequence; identical to SEQ ID NO: 6
  Description of Artificial Sequence: Synthetic Heavy chain variable region CDR H2 nucleic acid sequence

SEQ ID NO: 567 - protein, 16 aa, Artificial Sequence
  Description of Artificial Sequence: Synthetic Heavy chain variable region CDR H3 amino acid sequence
VRHGNFGNGYVSWFAH

SEQ ID NO: 568 - DNA, 48 bp, Artificial Sequence; identical to SEQ ID NO: 24
  Description of Artificial Sequence: Synthetic Heavy chain variable region CDR H3 nucleic acid sequence

SEQ ID NO: 569 - DNA, 327 bp, Artificial Sequence; identical to SEQ ID NO: 345
  Description of Artificial Sequence: Synthetic Light chain variable region nucleic acid sequence

SEQ ID NO: 570 - protein, 109 aa, Artificial Sequence; identical to SEQ ID NO: 346
  Description of Artificial Sequence: Synthetic Light chain variable region amino acid sequence

SEQ ID NO: 571 - protein, 14 aa, Artificial Sequence
  Description of Artificial Sequence: Synthetic Light chain variable region CDR L1 amino acid sequence
GSSTGAVTTSNYAN

SEQ ID NO: 572 - DNA, 42 bp, Artificial Sequence; identical to SEQ ID NO: 204
  Description of Artificial Sequence: Synthetic Light chain variable region CDR L1 nucleic acid sequence

SEQ ID NO: 573 - protein, 7 aa, Artificial Sequence
  Description of Artificial Sequence: Synthetic Light chain variable region CDR L2 amino acid sequence
GTDKRAP

SEQ ID NO: 574 - DNA, 21 bp, Artificial Sequence
  Description of Artificial Sequence: Synthetic Light chain variable region CDR L2 nucleic acid sequence
ggcacagacaagcgcgctcct

SEQ ID NO: 575 - protein, 9 aa, Artificial Sequence
  Description of Artificial Sequence: Synthetic Light chain variable region CDR L3 amino acid sequence
ALWYSNHWV

SEQ ID NO: 576 - DNA, 27 bp, Artificial Sequence
  Description of Artificial Sequence: Synthetic Light chain variable region CDR L3 nucleic acid sequence
gcgctgtggtacagtaaccattgggtg

SEQ ID NO: 577 - DNA, 375 bp, Artificial Sequence; identical to SEQ ID NO: 17
  Description of Artificial Sequence: Synthetic Heavy chain variable region nucleic acid sequence

SEQ ID NO: 578 - protein, 125 aa, Artificial Sequence; identical to SEQ ID NO: 18
  Description of Artificial Sequence: Synthetic Heavy chain variable region amino acid sequence

SEQ ID NO: 579 - protein, 9 aa, Artificial Sequence
  Description of Artificial Sequence: Synthetic Heavy chain variable region CDR H1 amino acid sequence
FTFDTYAMN

SEQ ID NO: 580 - DNA, 27 bp, Artificial Sequence
  Description of Artificial Sequence: Synthetic Heavy chain variable region CDR H1 nucleic acid sequence
ttcacctttgacacatatgccatgaat

SEQ ID NO: 581 - protein, 19 aa, Artificial Sequence
  Description of Artificial Sequence: Synthetic Heavy chain variable region CDR H2 amino acid sequence
RIRSKYNNYATYYADSVKD

SEQ ID NO: 582 - DNA, 57 bp, Artificial Sequence; identical to SEQ ID NO: 6
  Description of Artificial Sequence: Synthetic Heavy chain variable region CDR H2 nucleic acid sequence

SEQ ID NO: 583 - protein, 16 aa, Artificial Sequence
  Description of Artificial Sequence: Synthetic Heavy chain variable region CDR H3 amino acid sequence
VRHGNFGNGYVSWFAH

SEQ ID NO: 584 - DNA, 48 bp, Artificial Sequence; identical to SEQ ID NO: 24
  Description of Artificial Sequence: Synthetic Heavy chain variable region CDR H3 nucleic acid sequence

SEQ ID NO: 585 - DNA, 327 bp, Artificial Sequence; identical to SEQ ID NO: 345
  Description of Artificial Sequence: Synthetic Light chain variable region nucleic acid sequence

SEQ ID NO: 586 - protein, 109 aa, Artificial Sequence; identical to SEQ ID NO: 346
  Description of Artificial Sequence: Synthetic Light chain variable region amino acid sequence

SEQ ID NO: 587 - protein, 14 aa, Artificial Sequence
  Description of Artificial Sequence: Synthetic Light chain variable region CDR L1 amino acid sequence
GSSTGAVTTSNYAN

SEQ ID NO: 588 - DNA, 42 bp, Artificial Sequence; identical to SEQ ID NO: 204
  Description of Artificial Sequence: Synthetic Light chain variable region CDR L1 nucleic acid sequence

SEQ ID NO: 589 - protein, 7 aa, Artificial Sequence
  Description of Artificial Sequence: Synthetic Light chain variable region CDR L2 amino acid sequence
GTDKRAP

SEQ ID NO: 590 - DNA, 21 bp, Artificial Sequence
  Description of Artificial Sequence: Synthetic Light chain variable region CDR L2 nucleic acid sequence
ggcacagacaagcgcgctcct

SEQ ID NO: 591 - protein, 9 aa, Artificial Sequence
  Description of Artificial Sequence: Synthetic Light chain variable region CDR L3 amino acid sequence
ALWYSNHWV

SEQ ID NO: 592 - DNA, 27 bp, Artificial Sequence
  Description of Artificial Sequence: Synthetic Light chain variable region CDR L3 nucleic acid sequence
gcgctgtggtacagtaaccattgggtg

SEQ ID NO: 593 - DNA, 375 bp, Artificial Sequence; identical to SEQ ID NO: 17
  Description of Artificial Sequence: Synthetic Heavy chain variable region nucleic acid sequence

SEQ ID NO: 594 - protein, 125 aa, Artificial Sequence; identical to SEQ ID NO: 18
  Description of Artificial Sequence: Synthetic Heavy chain variable region amino acid sequence

SEQ ID NO: 595 - protein, 9 aa, Artificial Sequence
  Description of Artificial Sequence: Synthetic Heavy chain variable region CDR H1 amino acid sequence
FTFDTYAMN

SEQ ID NO: 596 - DNA, 27 bp, Artificial Sequence
  Description of Artificial Sequence: Synthetic Heavy chain variable region CDR H1 nucleic acid sequence
ttcacctttgacacatatgccatgaat

SEQ ID NO: 597 - protein, 19 aa, Artificial Sequence
  Description of Artificial Sequence: Synthetic Heavy chain variable region CDR H2 amino acid sequence
RIRSKYNNYATYYADSVKD

SEQ ID NO: 598 - DNA, 57 bp, Artificial Sequence; identical to SEQ ID NO: 6
  Description of Artificial Sequence: Synthetic Heavy chain variable region CDR H2 nucleic acid sequence

SEQ ID NO: 599 - protein, 16 aa, Artificial Sequence
  Description of Artificial Sequence: Synthetic Heavy chain variable region CDR H3 amino acid sequence
VRHGNFGNGYVSWFAH

SEQ ID NO: 600 - DNA, 48 bp, Artificial Sequence; identical to SEQ ID NO: 24
  Description of Artificial Sequence: Synthetic Heavy chain variable region CDR H3 nucleic acid sequence

SEQ ID NO: 601 - DNA, 327 bp, Artificial Sequence; identical to SEQ ID NO: 345
  Description of Artificial Sequence: Synthetic Light chain variable region nucleic acid sequence

SEQ ID NO: 602 - protein, 109 aa, Artificial Sequence; identical to SEQ ID NO: 346
  Description of Artificial Sequence: Synthetic Light chain variable region amino acid sequence

SEQ ID NO: 603 - protein, 14 aa, Artificial Sequence
  Description of Artificial Sequence: Synthetic Light chain variable region CDR L1 amino acid sequence
GSSTGAVTTSNYAN

SEQ ID NO: 604 - DNA, 42 bp, Artificial Sequence; identical to SEQ ID NO: 204
  Description of Artificial Sequence: Synthetic Light chain variable region CDR L1 nucleic acid sequence

SEQ ID NO: 605 - protein, 7 aa, Artificial Sequence
  Description of Artificial Sequence: Synthetic Light chain variable region CDR L2 amino acid sequence
GTDKRAP

SEQ ID NO: 606 - DNA, 21 bp, Artificial Sequence
  Description of Artificial Sequence: Synthetic Light chain variable region CDR L2 nucleic acid sequence
ggcacagacaagcgcgctcct

SEQ ID NO: 607 - protein, 9 aa, Artificial Sequence
  Description of Artificial Sequence: Synthetic Light chain variable region CDR L3 amino acid sequence
ALWYSNHWV

SEQ ID NO: 608 - DNA, 27 bp, Artificial Sequence
  Description of Artificial Sequence: Synthetic Light chain variable region CDR L3 nucleic acid sequence
gcgctgtggtacagtaaccattgggtg

SEQ ID NO: 609 - DNA, 375 bp, Artificial Sequence; identical to SEQ ID NO: 17
  Description of Artificial Sequence: Synthetic Heavy chain variable region nucleic acid sequence

SEQ ID NO: 610 - protein, 125 aa, Artificial Sequence; identical to SEQ ID NO: 18
  Description of Artificial Sequence: Synthetic Heavy chain variable region amino acid sequence

SEQ ID NO: 611 - protein, 9 aa, Artificial Sequence
  Description of Artificial Sequence: Synthetic Heavy chain variable region CDR H1 amino acid sequence
FTFDTYAMN

SEQ ID NO: 612 - DNA, 27 bp, Artificial Sequence
  Description of Artificial Sequence: Synthetic Heavy chain variable region CDR H1 nucleic acid sequence
ttcacctttgacacatatgccatgaat

SEQ ID NO: 613 - protein, 19 aa, Artificial Sequence
  Description of Artificial Sequence: Synthetic Heavy chain variable region CDR H2 amino acid sequence
RIRSKYNNYATYYADSVKD

SEQ ID NO: 614 - DNA, 57 bp, Artificial Sequence; identical to SEQ ID NO: 6
  Description of Artificial Sequence: Synthetic Heavy chain variable region CDR H2 nucleic acid sequence

SEQ ID NO: 615 - protein, 16 aa, Artificial Sequence
  Description of Artificial Sequence: Synthetic Heavy chain variable region CDR H3 amino acid sequence
VRHGNFGNGYVSWFAH

SEQ ID NO: 616 - DNA, 48 bp, Artificial Sequence; identical to SEQ ID NO: 24
  Description of Artificial Sequence: Synthetic Heavy chain variable region CDR H3 nucleic acid sequence

SEQ ID NO: 617 - DNA, 327 bp, Artificial Sequence; identical to SEQ ID NO: 345
  Description of Artificial Sequence: Synthetic Light chain variable region nucleic acid sequence

SEQ ID NO: 618 - protein, 109 aa, Artificial Sequence; identical to SEQ ID NO: 346
  Description of Artificial Sequence: Synthetic Light chain variable region amino acid sequence

SEQ ID NO: 619 - protein, 14 aa, Artificial Sequence
  Description of Artificial Sequence: Synthetic Light chain variable region CDR L1 amino acid sequence
GSSTGAVTTSNYAN

SEQ ID NO: 620 - DNA, 42 bp, Artificial Sequence; identical to SEQ ID NO: 204
  Description of Artificial Sequence: Synthetic Light chain variable region CDR L1 nucleic acid sequence

SEQ ID NO: 621 - protein, 7 aa, Artificial Sequence
  Description of Artificial Sequence: Synthetic Light chain variable region CDR L2 amino acid sequence
GTDKRAP

SEQ ID NO: 622 - DNA, 21 bp, Artificial Sequence
  Description of Artificial Sequence: Synthetic Light chain variable region CDR L2 nucleic acid sequence
ggcacagacaagcgcgctcct

SEQ ID NO: 623 - protein, 9 aa, Artificial Sequence
  Description of Artificial Sequence: Synthetic Light chain variable region CDR L3 amino acid sequence
ALWYSNHWV

SEQ ID NO: 624 - DNA, 27 bp, Artificial Sequence
  Description of Artificial Sequence: Synthetic Light chain variable region CDR L3 nucleic acid sequence
gcgctgtggtacagtaaccattgggtg

SEQ ID NO: 625 - DNA, 375 bp, Artificial Sequence; identical to SEQ ID NO: 17
  Description of Artificial Sequence: Synthetic Heavy chain variable region nucleic acid sequence

SEQ ID NO: 626 - protein, 125 aa, Artificial Sequence; identical to SEQ ID NO: 18
  Description of Artificial Sequence: Synthetic Heavy chain variable region amino acid sequence

SEQ ID NO: 627 - protein, 9 aa, Artificial Sequence
  Description of Artificial Sequence: Synthetic Heavy chain variable region CDR H1 amino acid sequence
FTFDTYAMN

SEQ ID NO: 628 - DNA, 27 bp, Artificial Sequence
  Description of Artificial Sequence: Synthetic Heavy chain variable region CDR H1 nucleic acid sequence
ttcacctttgacacatatgccatgaat

SEQ ID NO: 629 - protein, 19 aa, Artificial Sequence
  Description of Artificial Sequence: Synthetic Heavy chain variable region CDR H2 amino acid sequence
RIRSKYNNYATYYADSVKD

SEQ ID NO: 630 - DNA, 57 bp, Artificial Sequence; identical to SEQ ID NO: 6
  Description of Artificial Sequence: Synthetic Heavy chain variable region CDR H2 nucleic acid sequence

SEQ ID NO: 631 - protein, 16 aa, Artificial Sequence
  Description of Artificial Sequence: Synthetic Heavy chain variable region CDR H3 amino acid sequence
VRHGNFGNGYVSWFAH

SEQ ID NO: 632 - DNA, 48 bp, Artificial Sequence; identical to SEQ ID NO: 24
  Description of Artificial Sequence: Synthetic Heavy chain variable region CDR H3 nucleic acid sequence

SEQ ID NO: 633 - DNA, 327 bp, Artificial Sequence; identical to SEQ ID NO: 345
  Description of Artificial Sequence: Synthetic Light chain variable region nucleic acid sequence

SEQ ID NO: 634 - protein, 109 aa, Artificial Sequence; identical to SEQ ID NO: 346
  Description of Artificial Sequence: Synthetic Light chain variable region amino acid sequence

SEQ ID NO: 635 - protein, 14 aa, Artificial Sequence
  Description of Artificial Sequence: Synthetic Light chain variable region CDR L1 amino acid sequence
GSSTGAVTTSNYAN

SEQ ID NO: 636 - DNA, 42 bp, Artificial Sequence; identical to SEQ ID NO: 204
  Description of Artificial Sequence: Synthetic Light chain variable region CDR L1 nucleic acid sequence

SEQ ID NO: 637 - protein, 7 aa, Artificial Sequence
  Description of Artificial Sequence: Synthetic Light chain variable region CDR L2 amino acid sequence
GTDKRAP

SEQ ID NO: 638 - DNA, 21 bp, Artificial Sequence
  Description of Artificial Sequence: Synthetic Light chain variable region CDR L2 nucleic acid sequence
ggcacagacaagcgcgctcct

SEQ ID NO: 639 - protein, 9 aa, Artificial Sequence
  Description of Artificial Sequence: Synthetic Light chain variable region CDR L3 amino acid sequence
ALWYSNHWV

SEQ ID NO: 640 - DNA, 27 bp, Artificial Sequence
  Description of Artificial Sequence: Synthetic Light chain variable region CDR L3 nucleic acid sequence
gcgctgtggtacagtaaccattgggtg

SEQ ID NO: 641 - DNA, 375 bp, Artificial Sequence
  Description of Artificial Sequence: Synthetic Heavy chain variable region nucleic acid sequence
gaggtgcagctgttggagtctgggggaggcttggtacagcctggggggtccctgagactctcctgtgcagcctctggattcacctttgacacatatgccatgaattgggttcgccaggctccagggaaggggctggagtgggtcgcaaggattagatccaagtataacaattacgctacatactactcatactccgtgaaggatcggttcaccatctccagagacgattccaagagcacgctgtatctgcaaatgaacagcctgagagccgaggacacggcggtgtactactgcgtcaggcacggtaacttcgggaacggttacgtatcctggtttgctcattggggccaaggaaccctggtcaccgtctcctca

SEQ ID NO: 642 - protein, 125 aa, Artificial Sequence
  Description of Artificial Sequence: Synthetic Heavy chain variable region amino acid sequence
EVQLLESGGGLVQPGGSLRLSCAASGFTFDTYAMNWVRQAPGKGLEWVARIRSKYNNYATYYSYSVKDRFTISRDDSKSTLYLQMNSLRAEDTAVYYCVRHGNFGNGYVSWFAHWGQGTLVTVSS

SEQ ID NO: 643 - protein, 9 aa, Artificial Sequence
  Description of Artificial Sequence: Synthetic Heavy chain variable region CDR H1 amino acid sequence
FTFDTYAMN

SEQ ID NO: 644 - DNA, 27 bp, Artificial Sequence
  Description of Artificial Sequence: Synthetic Heavy chain variable region CDR H1 nucleic acid sequence
ttcacctttgacacatatgccatgaat

SEQ ID NO: 645 - protein, 19 aa, Artificial Sequence
  Description of Artificial Sequence: Synthetic Heavy chain variable region CDR H2 amino acid sequence
RIRSKYNNYATYYSYSVKD

SEQ ID NO: 646 - DNA, 57 bp, Artificial Sequence
  Description of Artificial Sequence: Synthetic Heavy chain variable region CDR H2 nucleic acid sequence
aggattagatccaagtataacaattacgctacatactactcatactccgtgaaggat

SEQ ID NO: 647 - protein, 16 aa, Artificial Sequence
  Description of Artificial Sequence: Synthetic Heavy chain variable region CDR H3 amino acid sequence
VRHGNFGNGYVSWFAH

SEQ ID NO: 648 - DNA, 48 bp, Artificial Sequence; identical to SEQ ID NO: 24
  Description of Artificial Sequence: Synthetic Heavy chain variable region CDR H3 nucleic acid sequence

SEQ ID NO: 649 - DNA, 327 bp, Artificial Sequence; identical to SEQ ID NO: 345
  Description of Artificial Sequence: Synthetic Light chain variable region nucleic acid sequence

SEQ ID NO: 650 - protein, 109 aa, Artificial Sequence; identical to SEQ ID NO: 346
  Description of Artificial Sequence: Synthetic Light chain variable region amino acid sequence

SEQ ID NO: 651 - protein, 14 aa, Artificial Sequence
  Description of Artificial Sequence: Synthetic Light chain variable region CDR L1 amino acid sequence
GSSTGAVTTSNYAN

SEQ ID NO: 652 - DNA, 42 bp, Artificial Sequence; identical to SEQ ID NO: 204
  Description of Artificial Sequence: Synthetic Light chain variable region CDR L1 nucleic acid sequence

SEQ ID NO: 653 - protein, 7 aa, Artificial Sequence
  Description of Artificial Sequence: Synthetic Light chain variable region CDR L2 amino acid sequence
GTDKRAP

SEQ ID NO: 654 - DNA, 21 bp, Artificial Sequence
  Description of Artificial Sequence: Synthetic Light chain variable region CDR L2 nucleic acid sequence
ggcacagacaagcgcgctcct

SEQ ID NO: 655 - protein, 9 aa, Artificial Sequence
  Description of Artificial Sequence: Synthetic Light chain variable region CDR L3 amino acid sequence
ALWYSNHWV

SEQ ID NO: 656 - DNA, 27 bp, Artificial Sequence
  Description of Artificial Sequence: Synthetic Light chain variable region CDR L3 nucleic acid sequence
gcgctgtggtacagtaaccattgggtg

SEQ ID NO: 657 - DNA, 375 bp, Artificial Sequence; identical to SEQ ID NO: 17
  Description of Artificial Sequence: Synthetic Heavy chain variable region nucleic acid sequence

SEQ ID NO: 658 - protein, 125 aa, Artificial Sequence; identical to SEQ ID NO: 18
  Description of Artificial Sequence: Synthetic Heavy chain variable region amino acid sequence

SEQ ID NO: 659 - protein, 9 aa, Artificial Sequence
  Description of Artificial Sequence: Synthetic Heavy chain variable region CDR H1 amino acid sequence
FTFDTYAMN

SEQ ID NO: 660 - DNA, 27 bp, Artificial Sequence
  Description of Artificial Sequence: Synthetic Heavy chain variable region CDR H1 nucleic acid sequence
ttcacctttgacacatatgccatgaat

SEQ ID NO: 661 - protein, 19 aa, Artificial Sequence
  Description of Artificial Sequence: Synthetic Heavy chain variable region CDR H2 amino acid sequence
RIRSKYNNYATYYADSVKD

SEQ ID NO: 662 - DNA, 57 bp, Artificial Sequence; identical to SEQ ID NO: 6
  Description of Artificial Sequence: Synthetic Heavy chain variable region CDR H2 nucleic acid sequence

SEQ ID NO: 663 - protein, 16 aa, Artificial Sequence
  Description of Artificial Sequence: Synthetic Heavy chain variable region CDR H3 amino acid sequence
VRHGNFGNGYVSWFAH

SEQ ID NO: 664 - DNA, 48 bp, Artificial Sequence; identical to SEQ ID NO: 24
  Description of Artificial Sequence: Synthetic Heavy chain variable region CDR H3 nucleic acid sequence

SEQ ID NO: 665 - DNA, 327 bp, Artificial Sequence; identical to SEQ ID NO: 345
  Description of Artificial Sequence: Synthetic Light chain variable region nucleic acid sequence

SEQ ID NO: 666 - protein, 109 aa, Artificial Sequence; identical to SEQ ID NO: 346
  Description of Artificial Sequence: Synthetic Light chain variable region amino acid sequence

SEQ ID NO: 667 - protein, 14 aa, Artificial Sequence
  Description of Artificial Sequence: Synthetic Light chain variable region CDR L1 amino acid sequence
GSSTGAVTTSNYAN

SEQ ID NO: 668 - DNA, 42 bp, Artificial Sequence; identical to SEQ ID NO: 204
  Description of Artificial Sequence: Synthetic Light chain variable region CDR L1 nucleic acid sequence

SEQ ID NO: 669 - protein, 7 aa, Artificial Sequence
  Description of Artificial Sequence: Synthetic Light chain variable region CDR L2 amino acid sequence
GTDKRAP

SEQ ID NO: 670 - DNA, 21 bp, Artificial Sequence
  Description of Artificial Sequence: Synthetic Light chain variable region CDR L2 nucleic acid sequence
ggcacagacaagcgcgctcct

SEQ ID NO: 671 - protein, 9 aa, Artificial Sequence
  Description of Artificial Sequence: Synthetic Light chain variable region CDR L3 amino acid sequence
ALWYSNHWV

SEQ ID NO: 672 - DNA, 27 bp, Artificial Sequence
  Description of Artificial Sequence: Synthetic Light chain variable region CDR L3 nucleic acid sequence
gcgctgtggtacagtaaccattgggtg

SEQ ID NO: 673 - DNA, 375 bp, Artificial Sequence; identical to SEQ ID NO: 17
  Description of Artificial Sequence: Synthetic Heavy chain variable region nucleic acid sequence

SEQ ID NO: 674 - protein, 125 aa, Artificial Sequence; identical to SEQ ID NO: 18
  Description of Artificial Sequence: Synthetic Heavy chain variable region amino acid sequence

SEQ ID NO: 675 - protein, 9 aa, Artificial Sequence
  Description of Artificial Sequence: Synthetic Heavy chain variable region CDR H1 amino acid sequence
FTFDTYAMN

SEQ ID NO: 676 - DNA, 27 bp, Artificial Sequence
  Description of Artificial Sequence: Synthetic Heavy chain variable region CDR H1 nucleic acid sequence
ttcacctttgacacatatgccatgaat

SEQ ID NO: 677 - protein, 19 aa, Artificial Sequence
  Description of Artificial Sequence: Synthetic Heavy chain variable region CDR H2 amino acid sequence
RIRSKYNNYATYYADSVKD

SEQ ID NO: 678 - DNA, 57 bp, Artificial Sequence; identical to SEQ ID NO: 6
  Description of Artificial Sequence: Synthetic Heavy chain variable region CDR H2 nucleic acid sequence

SEQ ID NO: 679 - protein, 16 aa, Artificial Sequence
  Description of Artificial Sequence: Synthetic Heavy chain variable region CDR H3 amino acid sequence
VRHGNFGNGYVSWFAH

SEQ ID NO: 680 - DNA, 48 bp, Artificial Sequence; identical to SEQ ID NO: 24
  Description of Artificial Sequence: Synthetic Heavy chain variable region CDR H3 nucleic acid sequence

SEQ ID NO: 681 - DNA, 327 bp, Artificial Sequence; identical to SEQ ID NO: 345
  Description of Artificial Sequence: Synthetic Light chain variable region nucleic acid sequence

SEQ ID NO: 682 - protein, 109 aa, Artificial Sequence; identical to SEQ ID NO: 346
  Description of Artificial Sequence: Synthetic Light chain variable region amino acid sequence

SEQ ID NO: 683 - protein, 14 aa, Artificial Sequence
  Description of Artificial Sequence: Synthetic Light chain variable region CDR L1 amino acid sequence
GSSTGAVTTSNYAN

SEQ ID NO: 684 - DNA, 42 bp, Artificial Sequence; identical to SEQ ID NO: 204
  Description of Artificial Sequence: Synthetic Light chain variable region CDR L1 nucleic acid sequence

SEQ ID NO: 685 - protein, 7 aa, Artificial Sequence
  Description of Artificial Sequence: Synthetic Light chain variable region CDR L2 amino acid sequence
GTDKRAP

SEQ ID NO: 686 - DNA, 21 bp, Artificial Sequence
  Description of Artificial Sequence: Synthetic Light chain variable region CDR L2 nucleic acid sequence
ggcacagacaagcgcgctcct

SEQ ID NO: 687 - protein, 9 aa, Artificial Sequence
  Description of Artificial Sequence: Synthetic Light chain variable region CDR L3 amino acid sequence
ALWYSNHWV

SEQ ID NO: 688 - DNA, 27 bp, Artificial Sequence
  Description of Artificial Sequence: Synthetic Light chain variable region CDR L3 nucleic acid sequence
gcgctgtggtacagtaaccattgggtg

SEQ ID NO: 689 - DNA, 375 bp, Artificial Sequence; identical to SEQ ID NO: 17
  Description of Artificial Sequence: Synthetic Heavy chain variable region nucleic acid sequence

SEQ ID NO: 690 - protein, 125 aa, Artificial Sequence; identical to SEQ ID NO: 18
  Description of Artificial Sequence: Synthetic Heavy chain variable region amino acid sequence

SEQ ID NO: 691 - protein, 9 aa, Artificial Sequence
  Description of Artificial Sequence: Synthetic Heavy chain variable region CDR H1 amino acid sequence
FTFDTYAMN

SEQ ID NO: 692 - DNA, 27 bp, Artificial Sequence
  Description of Artificial Sequence: Synthetic Heavy chain variable region CDR H1 nucleic acid sequence
ttcacctttgacacatatgccatgaat

SEQ ID NO: 693 - protein, 19 aa, Artificial Sequence
  Description of Artificial Sequence: Synthetic Heavy chain variable region CDR H2 amino acid sequence
RIRSKYNNYATYYADSVKD

SEQ ID NO: 694 - DNA, 57 bp, Artificial Sequence; identical to SEQ ID NO: 6
  Description of Artificial Sequence: Synthetic Heavy chain variable region CDR H2 nucleic acid sequence

SEQ ID NO: 695 - protein, 16 aa, Artificial Sequence
  Description of Artificial Sequence: Synthetic Heavy chain variable region CDR H3 amino acid sequence
VRHGNFGNGYVSWFAH

SEQ ID NO: 696 - DNA, 48 bp, Artificial Sequence; identical to SEQ ID NO: 24
  Description of Artificial Sequence: Synthetic Heavy chain variable region CDR H3 nucleic acid sequence

SEQ ID NO: 697 - DNA, 327 bp, Artificial Sequence; identical to SEQ ID NO: 345
  Description of Artificial Sequence: Synthetic Light chain variable region nucleic acid sequence

SEQ ID NO: 698 - protein, 109 aa, Artificial Sequence; identical to SEQ ID NO: 346
  Description of Artificial Sequence: Synthetic Light chain variable region amino acid sequence

SEQ ID NO: 699 - protein, 14 aa, Artificial Sequence
  Description of Artificial Sequence: Synthetic Light chain variable region CDR L1 amino acid sequence
GSSTGAVTTSNYAN

SEQ ID NO: 700 - DNA, 42 bp, Artificial Sequence; identical to SEQ ID NO: 204
  Description of Artificial Sequence: Synthetic Light chain variable region CDR L1 nucleic acid sequence

SEQ ID NO: 701 - protein, 7 aa, Artificial Sequence
  Description of Artificial Sequence: Synthetic Light chain variable region CDR L2 amino acid sequence
GTDKRAP

SEQ ID NO: 702 - DNA, 21 bp, Artificial Sequence
  Description of Artificial Sequence: Synthetic Light chain variable region CDR L2 nucleic acid sequence
ggcacagacaagcgcgctcct

SEQ ID NO: 703 - protein, 9 aa, Artificial Sequence
  Description of Artificial Sequence: Synthetic Light chain variable region CDR L3 amino acid sequence
ALWYSNHWV

SEQ ID NO: 704 - DNA, 27 bp, Artificial Sequence
  Description of Artificial Sequence: Synthetic Light chain variable region CDR L3 nucleic acid sequence
gcgctgtggtacagtaaccattgggtg

SEQ ID NO: 705 - DNA, 375 bp, Artificial Sequence; identical to SEQ ID NO: 17
  Description of Artificial Sequence: Synthetic Heavy chain variable region nucleic acid sequence

SEQ ID NO: 706 - protein, 125 aa, Artificial Sequence; identical to SEQ ID NO: 18
  Description of Artificial Sequence: Synthetic Heavy chain variable region amino acid sequence

SEQ ID NO: 707 - protein, 9 aa, Artificial Sequence
  Description of Artificial Sequence: Synthetic Heavy chain variable region CDR H1 amino acid sequence
FTFDTYAMN

SEQ ID NO: 708 - DNA, 27 bp, Artificial Sequence
  Description of Artificial Sequence: Synthetic Heavy chain variable region CDR H1 nucleic acid sequence
ttcacctttgacacatatgccatgaat

SEQ ID NO: 709 - protein, 19 aa, Artificial Sequence
  Description of Artificial Sequence: Synthetic Heavy chain variable region CDR H2 amino acid sequence
RIRSKYNNYATYYADSVKD

SEQ ID NO: 710 - DNA, 57 bp, Artificial Sequence; identical to SEQ ID NO: 6
  Description of Artificial Sequence: Synthetic Heavy chain variable region CDR H2 nucleic acid sequence

SEQ ID NO: 711 - protein, 16 aa, Artificial Sequence
  Description of Artificial Sequence: Synthetic Heavy chain variable region CDR H3 amino acid sequence
VRHGNFGNGYVSWFAH

SEQ ID NO: 712 - DNA, 48 bp, Artificial Sequence; identical to SEQ ID NO: 24
  Description of Artificial Sequence: Synthetic Heavy chain variable region CDR H3 nucleic acid sequence

SEQ ID NO: 713 - DNA, 327 bp, Artificial Sequence; identical to SEQ ID NO: 345
  Description of Artificial Sequence: Synthetic Light chain variable region nucleic acid sequence

SEQ ID NO: 714 - protein, 109 aa, Artificial Sequence; identical to SEQ ID NO: 346
  Description of Artificial Sequence: Synthetic Light chain variable region amino acid sequence

SEQ ID NO: 715 - protein, 14 aa, Artificial Sequence
  Description of Artificial Sequence: Synthetic Light chain variable region CDR L1 amino acid sequence
GSSTGAVTTSNYAN

SEQ ID NO: 716 - DNA, 42 bp, Artificial Sequence; identical to SEQ ID NO: 204
  Description of Artificial Sequence: Synthetic Light chain variable region CDR L1 nucleic acid sequence

SEQ ID NO: 717 - protein, 7 aa, Artificial Sequence
  Description of Artificial Sequence: Synthetic Light chain variable region CDR L2 amino acid sequence
GTDKRAP

SEQ ID NO: 718 - DNA, 21 bp, Artificial Sequence
  Description of Artificial Sequence: Synthetic Light chain variable region CDR L2 nucleic acid sequence
ggcacagacaagcgcgctcct

SEQ ID NO: 719 - protein, 9 aa, Artificial Sequence
  Description of Artificial Sequence: Synthetic Light chain variable region CDR L3 amino acid sequence
ALWYSNHWV

SEQ ID NO: 720 - DNA, 27 bp, Artificial Sequence
  Description of Artificial Sequence: Synthetic Light chain variable region CDR L3 nucleic acid sequence
gcgctgtggtacagtaaccattgggtg

SEQ ID NO: 721 - DNA, 375 bp, Artificial Sequence; identical to SEQ ID NO: 17
  Description of Artificial Sequence: Synthetic Heavy chain variable region nucleic acid sequence

SEQ ID NO: 722 - protein, 125 aa, Artificial Sequence; identical to SEQ ID NO: 18
  Description of Artificial Sequence: Synthetic Heavy chain variable region amino acid sequence

SEQ ID NO: 723 - protein, 9 aa, Artificial Sequence
  Description of Artificial Sequence: Synthetic Heavy chain variable region CDR H1 amino acid sequence
FTFDTYAMN

SEQ ID NO: 724 - DNA, 27 bp, Artificial Sequence
  Description of Artificial Sequence: Synthetic Heavy chain variable region CDR H1 nucleic acid sequence
ttcacctttgacacatatgccatgaat

SEQ ID NO: 725 - protein, 19 aa, Artificial Sequence
  Description of Artificial Sequence: Synthetic Heavy chain variable region CDR H2 amino acid sequence
RIRSKYNNYATYYADSVKD

SEQ ID NO: 726 - DNA, 57 bp, Artificial Sequence; identical to SEQ ID NO: 6
  Description of Artificial Sequence: Synthetic Heavy chain variable region CDR H2 nucleic acid sequence

SEQ ID NO: 727 - protein, 16 aa, Artificial Sequence
  Description of Artificial Sequence: Synthetic Heavy chain variable region CDR H3 amino acid sequence
VRHGNFGNGYVSWFAH

SEQ ID NO: 728 - DNA, 48 bp, Artificial Sequence; identical to SEQ ID NO: 24
  Description of Artificial Sequence: Synthetic Heavy chain variable region CDR H3 nucleic acid sequence

SEQ ID NO: 729 - DNA, 327 bp, Artificial Sequence; identical to SEQ ID NO: 345
  Description of Artificial Sequence: Synthetic Light chain variable region nucleic acid sequence

SEQ ID NO: 730 - protein, 109 aa, Artificial Sequence; identical to SEQ ID NO: 346
  Description of Artificial Sequence: Synthetic Light chain variable region amino acid sequence

SEQ ID NO: 731 - protein, 14 aa, Artificial Sequence
  Description of Artificial Sequence: Synthetic Light chain variable region CDR L1 amino acid sequence
GSSTGAVTTSNYAN

SEQ ID NO: 732 - DNA, 42 bp, Artificial Sequence; identical to SEQ ID NO: 204
  Description of Artificial Sequence: Synthetic Light chain variable region CDR L1 nucleic acid sequence

SEQ ID NO: 733 - protein, 7 aa, Artificial Sequence
  Description of Artificial Sequence: Synthetic Light chain variable region CDR L2 amino acid sequence
GTDKRAP

SEQ ID NO: 734 - DNA, 21 bp, Artificial Sequence
  Description of Artificial Sequence: Synthetic Light chain variable region CDR L2 nucleic acid sequence
ggcacagacaagcgcgctcct

SEQ ID NO: 735 - protein, 9 aa, Artificial Sequence
  Description of Artificial Sequence: Synthetic Light chain variable region CDR L3 amino acid sequence
ALWYSNHWV

SEQ ID NO: 736 - DNA, 27 bp, Artificial Sequence
  Description of Artificial Sequence: Synthetic Light chain variable region CDR L3 nucleic acid sequence
gcgctgtggtacagtaaccattgggtg

SEQ ID NO: 737 - DNA, 375 bp, Artificial Sequence; identical to SEQ ID NO: 17
  Description of Artificial Sequence: Synthetic Heavy chain variable region nucleic acid sequence

SEQ ID NO: 738 - protein, 125 aa, Artificial Sequence; identical to SEQ ID NO: 18
  Description of Artificial Sequence: Synthetic Heavy chain variable region amino acid sequence

SEQ ID NO: 739 - protein, 9 aa, Artificial Sequence
  Description of Artificial Sequence: Synthetic Heavy chain variable region CDR H1 amino acid sequence
FTFDTYAMN

SEQ ID NO: 740 - DNA, 27 bp, Artificial Sequence
  Description of Artificial Sequence: Synthetic Heavy chain variable region CDR H1 nucleic acid sequence
ttcacctttgacacatatgccatgaat

SEQ ID NO: 741 - protein, 19 aa, Artificial Sequence
  Description of Artificial Sequence: Synthetic Heavy chain variable region CDR H2 amino acid sequence
RIRSKYNNYATYYADSVKD

SEQ ID NO: 742 - DNA, 57 bp, Artificial Sequence; identical to SEQ ID NO: 6
  Description of Artificial Sequence: Synthetic Heavy chain variable region CDR H2 nucleic acid sequence

SEQ ID NO: 743 - protein, 16 aa, Artificial Sequence
  Description of Artificial Sequence: Synthetic Heavy chain variable region CDR H3 amino acid sequence
VRHGNFGNGYVSWFAH

SEQ ID NO: 744 - DNA, 48 bp, Artificial Sequence; identical to SEQ ID NO: 24
  Description of Artificial Sequence: Synthetic Heavy chain variable region CDR H3 nucleic acid sequence

SEQ ID NO: 745 - DNA, 327 bp, Artificial Sequence
  Description of Artificial Sequence: Synthetic Light chain variable region nucleic acid sequence
cagactgtggtgacccaggagccatcgctctcagtgtcccctggagggacagtcacactcacttgtggatcaagcactggcgcagtcactactagtaactacgccaactgggtccagcagaccccaggccaggctccgcgcggactcatcggcggcacagacaagcgcgctcctggggtccctgatcgtttctctggctccctgcttggggacaaagctgccctcaccatcacgggggcccaggcagaggatgaagctgattattactgtgcgctgtggtacagtaaccattgggtgttcggcggagggaccaagctgaccgtccta

SEQ ID NO: 746 - protein, 109 aa, Artificial Sequence; identical to SEQ ID NO: 346
  Description of Artificial Sequence: Synthetic Light chain variable region amino acid sequence

SEQ ID NO: 747 - protein, 14 aa, Artificial Sequence
  Description of Artificial Sequence: Synthetic Light chain variable region CDR L1 amino acid sequence
GSSTGAVTTSNYAN

SEQ ID NO: 748 - DNA, 42 bp, Artificial Sequence; identical to SEQ ID NO: 204
  Description of Artificial Sequence: Synthetic Light chain variable region CDR L1 nucleic acid sequence

SEQ ID NO: 749 - protein, 7 aa, Artificial Sequence
  Description of Artificial Sequence: Synthetic Light chain variable region CDR L2 amino acid sequence
GTDKRAP

SEQ ID NO: 750 - DNA, 21 bp, Artificial Sequence
  Description of Artificial Sequence: Synthetic Light chain variable region CDR L2 nucleic acid sequence
ggcacagacaagcgcgctcct

SEQ ID NO: 751 - protein, 9 aa, Artificial Sequence
  Description of Artificial Sequence: Synthetic Light chain variable region CDR L3 amino acid sequence
ALWYSNHWV

SEQ ID NO: 752 - DNA, 27 bp, Artificial Sequence
  Description of Artificial Sequence: Synthetic Light chain variable region CDR L3 nucleic acid sequence
gcgctgtggtacagtaaccattgggtg

SEQ ID NO: 753 - DNA, 375 bp, Artificial Sequence; identical to SEQ ID NO: 17
  Description of Artificial Sequence: Synthetic Heavy chain variable region nucleic acid sequence

SEQ ID NO: 754 - protein, 125 aa, Artificial Sequence; identical to SEQ ID NO: 18
  Description of Artificial Sequence: Synthetic Heavy chain variable region amino acid sequence

SEQ ID NO: 755 - protein, 9 aa, Artificial Sequence
  Description of Artificial Sequence: Synthetic Heavy chain variable region CDR H1 amino acid sequence
FTFDTYAMN

SEQ ID NO: 756 - DNA, 27 bp, Artificial Sequence
  Description of Artificial Sequence: Synthetic Heavy chain variable region CDR H1 nucleic acid sequence
ttcacctttgacacatatgccatgaat

SEQ ID NO: 757 - protein, 19 aa, Artificial Sequence
  Description of Artificial Sequence: Synthetic Heavy chain variable region CDR H2 amino acid sequence
RIRSKYNNYATYYADSVKD

SEQ ID NO: 758 - DNA, 57 bp, Artificial Sequence; identical to SEQ ID NO: 6
  Description of Artificial Sequence: Synthetic Heavy chain variable region CDR H2 nucleic acid sequence

SEQ ID NO: 759 - protein, 16 aa, Artificial Sequence
  Description of Artificial Sequence: Synthetic Heavy chain variable region CDR H3 amino acid sequence
VRHGNFGNGYVSWFAH

SEQ ID NO: 760 - DNA, 48 bp, Artificial Sequence; identical to SEQ ID NO: 24
  Description of Artificial Sequence: Synthetic Heavy chain variable region CDR H3 nucleic acid sequence

SEQ ID NO: 761 - DNA, 327 bp, Artificial Sequence; identical to SEQ ID NO: 345
  Description of Artificial Sequence: Synthetic Light chain variable region nucleic acid sequence

SEQ ID NO: 762 - protein, 109 aa, Artificial Sequence; identical to SEQ ID NO: 346
  Description of Artificial Sequence: Synthetic Light chain variable region amino acid sequence

SEQ ID NO: 763 - protein, 14 aa, Artificial Sequence
  Description of Artificial Sequence: Synthetic Light chain variable region CDR L1 amino acid sequence
GSSTGAVTTSNYAN

SEQ ID NO: 764 - DNA, 42 bp, Artificial Sequence; identical to SEQ ID NO: 204
  Description of Artificial Sequence: Synthetic Light chain variable region CDR L1 nucleic acid sequence

SEQ ID NO: 765 - protein, 7 aa, Artificial Sequence
  Description of Artificial Sequence: Synthetic Light chain variable region CDR L2 amino acid sequence
GTDKRAP

SEQ ID NO: 766 - DNA, 21 bp, Artificial Sequence
  Description of Artificial Sequence: Synthetic Light chain variable region CDR L2 nucleic acid sequence
ggcacagacaagcgcgctcct

SEQ ID NO: 767 - protein, 9 aa, Artificial Sequence
  Description of Artificial Sequence: Synthetic Light chain variable region CDR L3 amino acid sequence
ALWYSNHWV

SEQ ID NO: 768 - DNA, 27 bp, Artificial Sequence
  Description of Artificial Sequence: Synthetic Light chain variable region CDR L3 nucleic acid sequence
gcgctgtggtacagtaaccattgggtg

SEQ ID NO: 769 - DNA, 375 bp, Artificial Sequence; identical to SEQ ID NO: 17
  Description of Artificial Sequence: Synthetic Heavy chain variable region nucleic acid sequence

SEQ ID NO: 770 - protein, 125 aa, Artificial Sequence; identical to SEQ ID NO: 18
  Description of Artificial Sequence: Synthetic Heavy chain variable region amino acid sequence

SEQ ID NO: 771 - protein, 9 aa, Artificial Sequence
  Description of Artificial Sequence: Synthetic Heavy chain variable region CDR H1 amino acid sequence
FTFDTYAMN

SEQ ID NO: 772 - DNA, 27 bp, Artificial Sequence
  Description of Artificial Sequence: Synthetic Heavy chain variable region CDR H1 nucleic acid sequence
ttcacctttgacacatatgccatgaat

SEQ ID NO: 773 - protein, 19 aa, Artificial Sequence
  Description of Artificial Sequence: Synthetic Heavy chain variable region CDR H2 amino acid sequence
RIRSKYNNYATYYADSVKD

SEQ ID NO: 774 - DNA, 57 bp, Artificial Sequence; identical to SEQ ID NO: 6
  Description of Artificial Sequence: Synthetic Heavy chain variable region CDR H2 nucleic acid sequence

SEQ ID NO: 775 - protein, 16 aa, Artificial Sequence
  Description of Artificial Sequence: Synthetic Heavy chain variable region CDR H3 amino acid sequence
VRHGNFGNGYVSWFAH

SEQ ID NO: 776 - DNA, 48 bp, Artificial Sequence; identical to SEQ ID NO: 24
  Description of Artificial Sequence: Synthetic Heavy chain variable region CDR H3 nucleic acid sequence

SEQ ID NO: 777 - DNA, 327 bp, Artificial Sequence; identical to SEQ ID NO: 345
  Description of Artificial Sequence: Synthetic Light chain variable region nucleic acid sequence

SEQ ID NO: 778 - protein, 109 aa, Artificial Sequence; identical to SEQ ID NO: 346
  Description of Artificial Sequence: Synthetic Light chain variable region amino acid sequence

SEQ ID NO: 779 - protein, 14 aa, Artificial Sequence
  Description of Artificial Sequence: Synthetic Light chain variable region CDR L1 amino acid sequence
GSSTGAVTTSNYAN

SEQ ID NO: 780 - DNA, 42 bp, Artificial Sequence; identical to SEQ ID NO: 204
  Description of Artificial Sequence: Synthetic Light chain variable region CDR L1 nucleic acid sequence

SEQ ID NO: 781 - protein, 7 aa, Artificial Sequence
  Description of Artificial Sequence: Synthetic Light chain variable region CDR L2 amino acid sequence
GTDKRAP

SEQ ID NO: 782 - DNA, 21 bp, Artificial Sequence
  Description of Artificial Sequence: Synthetic Light chain variable region CDR L2 nucleic acid sequence
ggcacagacaagcgcgctcct

SEQ ID NO: 783 - protein, 9 aa, Artificial Sequence
  Description of Artificial Sequence: Synthetic Light chain variable region CDR L3 amino acid sequence
ALWYSNHWV

SEQ ID NO: 784 - DNA, 27 bp, Artificial Sequence
  Description of Artificial Sequence: Synthetic Light chain variable region CDR L3 nucleic acid sequence
gcgctgtggtacagtaaccattgggtg

SEQ ID NO: 785 - DNA, 375 bp, Artificial Sequence
  Description of Artificial Sequence: Synthetic Heavy chain variable region nucleic acid sequence
gaggtgcagctgttggagtctgggggaggcttggtacagcctggggggtccctgagactctcctgtgcagcctctggattcacctttgacacatatgccatgaattgggttcgccaggctccagggaagtgtctggagtgggtcgcaaggattagatccaagtataacaattacgctacatactacgcagactccgtgaaggatcggttcaccatctccagagacgattccaagagcacgctgtatctgcaaatgaacagcctgagagccgaggacacggcggtgtactactgcgtcaggcacggtaacttcgggaacggttacgtatcctggtttgctcattggggccaaggaaccctggtcaccgtctcctca

SEQ ID NO: 786 - protein, 125 aa, Artificial Sequence
  Description of Artificial Sequence: Synthetic Heavy chain variable region amino acid sequence
EVQLLESGGGLVQPGGSLRLSCAASGFTFDTYAMNWVRQAPGKCLEWVARIRSKYNNYATYYADSVKDRFTISRDDSKSTLYLQMNSLRAEDTAVYYCVRHGNFGNGYVSWFAHWGQGTLVTVSS

SEQ ID NO: 787 - protein, 9 aa, Artificial Sequence
  Description of Artificial Sequence: Synthetic Heavy chain variable region CDR H1 amino acid sequence
FTFDTYAMN

SEQ ID NO: 788 - DNA, 27 bp, Artificial Sequence
  Description of Artificial Sequence: Synthetic Heavy chain variable region CDR H1 nucleic acid sequence
ttcacctttgacacatatgccatgaat

SEQ ID NO: 789 - protein, 19 aa, Artificial Sequence
  Description of Artificial Sequence: Synthetic Heavy chain variable region CDR H2 amino acid sequence
RIRSKYNNYATYYADSVKD

SEQ ID NO: 790 - DNA, 57 bp, Artificial Sequence; identical to SEQ ID NO: 6
  Description of Artificial Sequence: Synthetic Heavy chain variable region CDR H2 nucleic acid sequence

SEQ ID NO: 791 - protein, 16 aa, Artificial Sequence
  Description of Artificial Sequence: Synthetic Heavy chain variable region CDR H3 amino acid sequence
VRHGNFGNGYVSWFAH

SEQ ID NO: 792 - DNA, 48 bp, Artificial Sequence; identical to SEQ ID NO: 24
  Description of Artificial Sequence: Synthetic Heavy chain variable region CDR H3 nucleic acid sequence

SEQ ID NO: 793 - DNA, 327 bp, Artificial Sequence
  Description of Artificial Sequence: Synthetic Light chain variable region nucleic acid sequence
cagactgtggtgacccaggagccatcgctctcagtgtcccctggagggacagtcacactcacttgtggatcaagcactggcgcagtcactactagtaactacgccaactgggtccagcagaccccaggccaggctccgcgcggactcatcggcggcacagacaagcgcgctcctggggtccctgatcgcttctctggctccctgcttggggacaaagctgccctcaccatcacgggggcccaggcagaggatgaagctgattattactgtgcgctgtggtacagtaaccattgggtgttcggctgtgggaccaagctgaccgtccta

SEQ ID NO: 794 - protein, 109 aa, Artificial Sequence
  Description of Artificial Sequence: Synthetic Light chain variable region amino acid sequence
QTVVTQEPSLSVSPGGTVTLTCGSSTGAVTTSNYANWVQQTPGQAPRGLIGGTDKRAPGVPDRFSGSLLGDKAALTITGAQAEDEADYYCALWYSNHWVFGCGTKLTVL

SEQ ID NO: 795 - protein, 14 aa, Artificial Sequence
  Description of Artificial Sequence: Synthetic Light chain variable region CDR L1 amino acid sequence
GSSTGAVTTSNYAN

SEQ ID NO: 796 - DNA, 42 bp, Artificial Sequence; identical to SEQ ID NO: 204
  Description of Artificial Sequence: Synthetic Light chain variable region CDR L1 nucleic acid sequence

SEQ ID NO: 797 - protein, 7 aa, Artificial Sequence
  Description of Artificial Sequence: Synthetic Light chain variable region CDR L2 amino acid sequence
GTDKRAP

SEQ ID NO: 798 - DNA, 21 bp, Artificial Sequence
  Description of Artificial Sequence: Synthetic Light chain variable region CDR L2 nucleic acid sequence
ggcacagacaagcgcgctcct

SEQ ID NO: 799 - protein, 9 aa, Artificial Sequence
  Description of Artificial Sequence: Synthetic Light chain variable region CDR L3 amino acid sequence
ALWYSNHWV

SEQ ID NO: 800 - DNA, 27 bp, Artificial Sequence
  Description of Artificial Sequence: Synthetic Light chain variable region CDR L3 nucleic acid sequence
gcgctgtggtacagtaaccattgggtg

SEQ ID NO: 801 - DNA, 375 bp, Artificial Sequence; identical to SEQ ID NO: 785
  Description of Artificial Sequence: Synthetic Heavy chain variable region nucleic acid sequence

SEQ ID NO: 802 - protein, 125 aa, Artificial Sequence; identical to SEQ ID NO: 786
  Description of Artificial Sequence: Synthetic Heavy chain variable region amino acid sequence

SEQ ID NO: 803 - protein, 9 aa, Artificial Sequence
  Description of Artificial Sequence: Synthetic Heavy chain variable region CDR H1 amino acid sequence
FTFDTYAMN

SEQ ID NO: 804 - DNA, 27 bp, Artificial Sequence
  Description of Artificial Sequence: Synthetic Heavy chain variable region CDR H1 nucleic acid sequence
ttcacctttgacacatatgccatgaat

SEQ ID NO: 805 - protein, 19 aa, Artificial Sequence
  Description of Artificial Sequence: Synthetic Heavy chain variable region CDR H2 amino acid sequence
RIRSKYNNYATYYADSVKD

SEQ ID NO: 806 - DNA, 57 bp, Artificial Sequence; identical to SEQ ID NO: 6
  Description of Artificial Sequence: Synthetic Heavy chain variable region CDR H2 nucleic acid sequence

SEQ ID NO: 807 - protein, 16 aa, Artificial Sequence
  Description of Artificial Sequence: Synthetic Heavy chain variable region CDR H3 amino acid sequence
VRHGNFGNGYVSWFAH

SEQ ID NO: 808 - DNA, 48 bp, Artificial Sequence; identical to SEQ ID NO: 24
  Description of Artificial Sequence: Synthetic Heavy chain variable region CDR H3 nucleic acid sequence

SEQ ID NO: 809 - DNA, 327 bp, Artificial Sequence; identical to SEQ ID NO: 793
  Description of Artificial Sequence: Synthetic Light chain variable region nucleic acid sequence

SEQ ID NO: 810 - protein, 109 aa, Artificial Sequence; identical to SEQ ID NO: 794
  Description of Artificial Sequence: Synthetic Light chain variable region amino acid sequence

SEQ ID NO: 811 - protein, 14 aa, Artificial Sequence
  Description of Artificial Sequence: Synthetic Light chain variable region CDR L1 amino acid sequence
GSSTGAVTTSNYAN

SEQ ID NO: 812 - DNA, 42 bp, Artificial Sequence; identical to SEQ ID NO: 204
  Description of Artificial Sequence: Synthetic Light chain variable region CDR L1 nucleic acid sequence

SEQ ID NO: 813 - protein, 7 aa, Artificial Sequence
  Description of Artificial Sequence: Synthetic Light chain variable region CDR L2 amino acid sequence
GTDKRAP

SEQ ID NO: 814 - DNA, 21 bp, Artificial Sequence
  Description of Artificial Sequence: Synthetic Light chain variable region CDR L2 nucleic acid sequence
ggcacagacaagcgcgctcct

SEQ ID NO: 815 - protein, 9 aa, Artificial Sequence
  Description of Artificial Sequence: Synthetic Light chain variable region CDR L3 amino acid sequence
ALWYSNHWV

SEQ ID NO: 816 - DNA, 27 bp, Artificial Sequence
  Description of Artificial Sequence: Synthetic Light chain variable region CDR L3 nucleic acid sequence
gcgctgtggtacagtaaccattgggtg

SEQ ID NO: 817 - DNA, 375 bp, Artificial Sequence; identical to SEQ ID NO: 785
  Description of Artificial Sequence: Synthetic Heavy chain variable region nucleic acid sequence

SEQ ID NO: 818 - protein, 125 aa, Artificial Sequence; identical to SEQ ID NO: 786
  Description of Artificial Sequence: Synthetic Heavy chain variable region amino acid sequence

SEQ ID NO: 819 - protein, 9 aa, Artificial Sequence
  Description of Artificial Sequence: Synthetic Heavy chain variable region CDR H1 amino acid sequence
FTFDTYAMN

SEQ ID NO: 820 - DNA, 27 bp, Artificial Sequence
  Description of Artificial Sequence: Synthetic Heavy chain variable region CDR H1 nucleic acid sequence
ttcacctttgacacatatgccatgaat

SEQ ID NO: 821 - protein, 19 aa, Artificial Sequence
  Description of Artificial Sequence: Synthetic Heavy chain variable region CDR H2 amino acid sequence
RIRSKYNNYATYYADSVKD

SEQ ID NO: 822 - DNA, 57 bp, Artificial Sequence; identical to SEQ ID NO: 6
  Description of Artificial Sequence: Synthetic Heavy chain variable region CDR H2 nucleic acid sequence

SEQ ID NO: 823 - protein, 16 aa, Artificial Sequence
  Description of Artificial Sequence: Synthetic Heavy chain variable region CDR H3 amino acid sequence
VRHGNFGNGYVSWFAH

SEQ ID NO: 824 - DNA, 48 bp, Artificial Sequence; identical to SEQ ID NO: 24
  Description of Artificial Sequence: Synthetic Heavy chain variable region CDR H3 nucleic acid sequence

SEQ ID NO: 825 - DNA, 327 bp, Artificial Sequence; identical to SEQ ID NO: 793
  Description of Artificial Sequence: Synthetic Light chain variable region nucleic acid sequence

SEQ ID NO: 826 - protein, 109 aa, Artificial Sequence; identical to SEQ ID NO: 794
  Description of Artificial Sequence: Synthetic Light chain variable region amino acid sequence

SEQ ID NO: 827 - protein, 14 aa, Artificial Sequence
  Description of Artificial Sequence: Synthetic Light chain variable region CDR L1 amino acid sequence
GSSTGAVTTSNYAN

SEQ ID NO: 828 - DNA, 42 bp, Artificial Sequence; identical to SEQ ID NO: 204
  Description of Artificial Sequence: Synthetic Light chain variable region CDR L1 nucleic acid sequence

SEQ ID NO: 829 - protein, 7 aa, Artificial Sequence
  Description of Artificial Sequence: Synthetic Light chain variable region CDR L2 amino acid sequence
GTDKRAP

SEQ ID NO: 830 - DNA, 21 bp, Artificial Sequence
  Description of Artificial Sequence: Synthetic Light chain variable region CDR L2 nucleic acid sequence
ggcacagacaagcgcgctcct

SEQ ID NO: 831 - protein, 9 aa, Artificial Sequence
  Description of Artificial Sequence: Synthetic Light chain variable region CDR L3 amino acid sequence
ALWYSNHWV

SEQ ID NO: 832 - DNA, 27 bp, Artificial Sequence
  Description of Artificial Sequence: Synthetic Light chain variable region CDR L3 nucleic acid sequence
gcgctgtggtacagtaaccattgggtg

SEQ ID NO: 833 - DNA, 375 bp, Artificial Sequence; identical to SEQ ID NO: 785
  Description of Artificial Sequence: Synthetic Heavy chain variable region nucleic acid sequence

SEQ ID NO: 834 - protein, 125 aa, Artificial Sequence; identical to SEQ ID NO: 786
  Description of Artificial Sequence: Synthetic Heavy chain variable region amino acid sequence

SEQ ID NO: 835 - protein, 9 aa, Artificial Sequence
  Description of Artificial Sequence: Synthetic Heavy chain variable region CDR H1 amino acid sequence
FTFDTYAMN

SEQ ID NO: 836 - DNA, 27 bp, Artificial Sequence
  Description of Artificial Sequence: Synthetic Heavy chain variable region CDR H1 nucleic acid sequence
ttcacctttgacacatatgccatgaat

SEQ ID NO: 837 - protein, 19 aa, Artificial Sequence
  Description of Artificial Sequence: Synthetic Heavy chain variable region CDR H2 amino acid sequence
RIRSKYNNYATYYADSVKD

SEQ ID NO: 838 - DNA, 57 bp, Artificial Sequence; identical to SEQ ID NO: 6
  Description of Artificial Sequence: Synthetic Heavy chain variable region CDR H2 nucleic acid sequence

SEQ ID NO: 839 - protein, 16 aa, Artificial Sequence
  Description of Artificial Sequence: Synthetic Heavy chain variable region CDR H3 amino acid sequence
VRHGNFGNGYVSWFAH

SEQ ID NO: 840 - DNA, 48 bp, Artificial Sequence; identical to SEQ ID NO: 24
  Description of Artificial Sequence: Synthetic Heavy chain variable region CDR H3 nucleic acid sequence

SEQ ID NO: 841 - DNA, 327 bp, Artificial Sequence; identical to SEQ ID NO: 793
  Description of Artificial Sequence: Synthetic Light chain variable region nucleic acid sequence

SEQ ID NO: 842 - protein, 109 aa, Artificial Sequence; identical to SEQ ID NO: 794
  Description of Artificial Sequence: Synthetic Light chain variable region amino acid sequence

SEQ ID NO: 843 - protein, 14 aa, Artificial Sequence
  Description of Artificial Sequence: Synthetic Light chain variable region CDR L1 amino acid sequence
GSSTGAVTTSNYAN

SEQ ID NO: 844 - DNA, 42 bp, Artificial Sequence; identical to SEQ ID NO: 204
  Description of Artificial Sequence: Synthetic Light chain variable region CDR L1 nucleic acid sequence

SEQ ID NO: 845 - protein, 7 aa, Artificial Sequence
  Description of Artificial Sequence: Synthetic Light chain variable region CDR L2 amino acid sequence
GTDKRAP

SEQ ID NO: 846 - DNA, 21 bp, Artificial Sequence
  Description of Artificial Sequence: Synthetic Light chain variable region CDR L2 nucleic acid sequence
ggcacagacaagcgcgctcct

SEQ ID NO: 847 - protein, 9 aa, Artificial Sequence
  Description of Artificial Sequence: Synthetic Light chain variable region CDR L3 amino acid sequence
ALWYSNHWV

SEQ ID NO: 848 - DNA, 27 bp, Artificial Sequence
  Description of Artificial Sequence: Synthetic Light chain variable region CDR L3 nucleic acid sequence
gcgctgtggtacagtaaccattgggtg

SEQ ID NO: 849 - DNA, 375 bp, Artificial Sequence; identical to SEQ ID NO: 785
  Description of Artificial Sequence: Synthetic Heavy chain variable region nucleic acid sequence

SEQ ID NO: 850 - protein, 125 aa, Artificial Sequence; identical to SEQ ID NO: 786
  Description of Artificial Sequence: Synthetic Heavy chain variable region amino acid sequence

SEQ ID NO: 851 - protein, 9 aa, Artificial Sequence
  Description of Artificial Sequence: Synthetic Heavy chain variable region CDR H1 amino acid sequence
FTFDTYAMN

SEQ ID NO: 852 - DNA, 27 bp, Artificial Sequence
  Description of Artificial Sequence: Synthetic Heavy chain variable region CDR H1 nucleic acid sequence
ttcacctttgacacatatgccatgaat

SEQ ID NO: 853 - protein, 19 aa, Artificial Sequence
  Description of Artificial Sequence: Synthetic Heavy chain variable region CDR H2 amino acid sequence
RIRSKYNNYATYYADSVKD

SEQ ID NO: 854 - DNA, 57 bp, Artificial Sequence; identical to SEQ ID NO: 6
  Description of Artificial Sequence: Synthetic Heavy chain variable region CDR H2 nucleic acid sequence

SEQ ID NO: 855 - protein, 16 aa, Artificial Sequence
  Description of Artificial Sequence: Synthetic Heavy chain variable region CDR H3 amino acid sequence
VRHGNFGNGYVSWFAH

SEQ ID NO: 856 - DNA, 48 bp, Artificial Sequence; identical to SEQ ID NO: 24
  Description of Artificial Sequence: Synthetic Heavy chain variable region CDR H3 nucleic acid sequence

SEQ ID NO: 857 - DNA, 327 bp, Artificial Sequence; identical to SEQ ID NO: 793
  Description of Artificial Sequence: Synthetic Light chain variable region nucleic acid sequence

SEQ ID NO: 858 - protein, 109 aa, Artificial Sequence; identical to SEQ ID NO: 794
  Description of Artificial Sequence: Synthetic Light chain variable region amino acid sequence

SEQ ID NO: 859 - protein, 14 aa, Artificial Sequence
  Description of Artificial Sequence: Synthetic Light chain variable region CDR L1 amino acid sequence
GSSTGAVTTSNYAN

SEQ ID NO: 860 - DNA, 42 bp, Artificial Sequence; identical to SEQ ID NO: 204
  Description of Artificial Sequence: Synthetic Light chain variable region CDR L1 nucleic acid sequence

SEQ ID NO: 861 - protein, 7 aa, Artificial Sequence
  Description of Artificial Sequence: Synthetic Light chain variable region CDR L2 amino acid sequence
GTDKRAP

SEQ ID NO: 862 - DNA, 21 bp, Artificial Sequence
  Description of Artificial Sequence: Synthetic Light chain variable region CDR L2 nucleic acid sequence
ggcacagacaagcgcgctcct

SEQ ID NO: 863 - protein, 9 aa, Artificial Sequence
  Description of Artificial Sequence: Synthetic Light chain variable region CDR L3 amino acid sequence
ALWYSNHWV

SEQ ID NO: 864 - DNA, 27 bp, Artificial Sequence
  Description of Artificial Sequence: Synthetic Light chain variable region CDR L3 nucleic acid sequence
gcgctgtggtacagtaaccattgggtg

SEQ ID NO: 865 - DNA, 375 bp, Artificial Sequence; identical to SEQ ID NO: 785
  Description of Artificial Sequence: Synthetic Heavy chain variable region nucleic acid sequence

SEQ ID NO: 866 - protein, 125 aa, Artificial Sequence; identical to SEQ ID NO: 786
  Description of Artificial Sequence: Synthetic Heavy chain variable region amino acid sequence

SEQ ID NO: 867 - protein, 9 aa, Artificial Sequence
  Description of Artificial Sequence: Synthetic Heavy chain variable region CDR H1 amino acid sequence
FTFDTYAMN

SEQ ID NO: 868 - DNA, 27 bp, Artificial Sequence
  Description of Artificial Sequence: Synthetic Heavy chain variable region CDR H1 nucleic acid sequence
ttcacctttgacacatatgccatgaat

SEQ ID NO: 869 - protein, 19 aa, Artificial Sequence
  Description of Artificial Sequence: Synthetic Heavy chain variable region CDR H2 amino acid sequence
RIRSKYNNYATYYADSVKD

SEQ ID NO: 870 - DNA, 57 bp, Artificial Sequence; identical to SEQ ID NO: 6
  Description of Artificial Sequence: Synthetic Heavy chain variable region CDR H2 nucleic acid sequence

SEQ ID NO: 871 - protein, 16 aa, Artificial Sequence
  Description of Artificial Sequence: Synthetic Heavy chain variable region CDR H3 amino acid sequence
VRHGNFGNGYVSWFAH

SEQ ID NO: 872 - DNA, 48 bp, Artificial Sequence; identical to SEQ ID NO: 24
  Description of Artificial Sequence: Synthetic Heavy chain variable region CDR H3 nucleic acid sequence

SEQ ID NO: 873 - DNA, 327 bp, Artificial Sequence; identical to SEQ ID NO: 793
  Description of Artificial Sequence: Synthetic Light chain variable region nucleic acid sequence

SEQ ID NO: 874 - protein, 109 aa, Artificial Sequence; identical to SEQ ID NO: 794
  Description of Artificial Sequence: Synthetic Light chain variable region amino acid sequence

SEQ ID NO: 875 - protein, 14 aa, Artificial Sequence
  Description of Artificial Sequence: Synthetic Light chain variable region CDR L1 amino acid sequence
GSSTGAVTTSNYAN

SEQ ID NO: 876 - DNA, 42 bp, Artificial Sequence; identical to SEQ ID NO: 204
  Description of Artificial Sequence: Synthetic Light chain variable region CDR L1 nucleic acid sequence

SEQ ID NO: 877 - protein, 7 aa, Artificial Sequence
  Description of Artificial Sequence: Synthetic Light chain variable region CDR L2 amino acid sequence
GTDKRAP

SEQ ID NO: 878 - DNA, 21 bp, Artificial Sequence
  Description of Artificial Sequence: Synthetic Light chain variable region CDR L2 nucleic acid sequence
ggcacagacaagcgcgctcct

SEQ ID NO: 879 - protein, 9 aa, Artificial Sequence
  Description of Artificial Sequence: Synthetic Light chain variable region CDR L3 amino acid sequence
ALWYSNHWV

SEQ ID NO: 880 - DNA, 27 bp, Artificial Sequence
  Description of Artificial Sequence: Synthetic Light chain variable region CDR L3 nucleic acid sequence
gcgctgtggtacagtaaccattgggtg

SEQ ID NO: 881 - DNA, 375 bp, Artificial Sequence; identical to SEQ ID NO: 785
  Description of Artificial Sequence: Synthetic Heavy chain variable region nucleic acid sequence

SEQ ID NO: 882 - protein, 125 aa, Artificial Sequence; identical to SEQ ID NO: 786
  Description of Artificial Sequence: Synthetic Heavy chain variable region amino acid sequence

SEQ ID NO: 883 - protein, 9 aa, Artificial Sequence
  Description of Artificial Sequence: Synthetic Heavy chain variable region CDR H1 amino acid sequence
FTFDTYAMN

SEQ ID NO: 884 - DNA, 27 bp, Artificial Sequence
  Description of Artificial Sequence: Synthetic Heavy chain variable region CDR H1 nucleic acid sequence
ttcacctttgacacatatgccatgaat

SEQ ID NO: 885 - protein, 19 aa, Artificial Sequence
  Description of Artificial Sequence: Synthetic Heavy chain variable region CDR H2 amino acid sequence
RIRSKYNNYATYYADSVKD

SEQ ID NO: 886 - DNA, 57 bp, Artificial Sequence; identical to SEQ ID NO: 6
  Description of Artificial Sequence: Synthetic Heavy chain variable region CDR H2 nucleic acid sequence

SEQ ID NO: 887 - protein, 16 aa, Artificial Sequence
  Description of Artificial Sequence: Synthetic Heavy chain variable region CDR H3 amino acid sequence
VRHGNFGNGYVSWFAH

SEQ ID NO: 888 - DNA, 48 bp, Artificial Sequence; identical to SEQ ID NO: 24
  Description of Artificial Sequence: Synthetic Heavy chain variable region CDR H3 nucleic acid sequence

SEQ ID NO: 889 - DNA, 327 bp, Artificial Sequence; identical to SEQ ID NO: 793
  Description of Artificial Sequence: Synthetic Light chain variable region nucleic acid sequence

SEQ ID NO: 890 - protein, 109 aa, Artificial Sequence; identical to SEQ ID NO: 794
  Description of Artificial Sequence: Synthetic Light chain variable region amino acid sequence

SEQ ID NO: 891 - protein, 14 aa, Artificial Sequence
  Description of Artificial Sequence: Synthetic Light chain variable region CDR L1 amino acid sequence
GSSTGAVTTSNYAN

SEQ ID NO: 892 - DNA, 42 bp, Artificial Sequence; identical to SEQ ID NO: 204
  Description of Artificial Sequence: Synthetic Light chain variable region CDR L1 nucleic acid sequence

SEQ ID NO: 893 - protein, 7 aa, Artificial Sequence
  Description of Artificial Sequence: Synthetic Light chain variable region CDR L2 amino acid sequence
GTDKRAP

SEQ ID NO: 894 - DNA, 21 bp, Artificial Sequence
  Description of Artificial Sequence: Synthetic Light chain variable region CDR L2 nucleic acid sequence
ggcacagacaagcgcgctcct

SEQ ID NO: 895 - protein, 9 aa, Artificial Sequence
  Description of Artificial Sequence: Synthetic Light chain variable region CDR L3 amino acid sequence
ALWYSNHWV

SEQ ID NO: 896 - DNA, 27 bp, Artificial Sequence
  Description of Artificial Sequence: Synthetic Light chain variable region CDR L3 nucleic acid sequence
gcgctgtggtacagtaaccattgggtg

SEQ ID NO: 897 - DNA, 375 bp, Artificial Sequence; identical to SEQ ID NO: 785
  Description of Artificial Sequence: Synthetic Heavy chain variable region nucleic acid sequence

SEQ ID NO: 898 - protein, 125 aa, Artificial Sequence; identical to SEQ ID NO: 786
  Description of Artificial Sequence: Synthetic Heavy chain variable region amino acid sequence

SEQ ID NO: 899 - protein, 9 aa, Artificial Sequence
  Description of Artificial Sequence: Synthetic Heavy chain variable region CDR H1 amino acid sequence
FTFDTYAMN

SEQ ID NO: 900 - DNA, 27 bp, Artificial Sequence
  Description of Artificial Sequence: Synthetic Heavy chain variable region CDR H1 nucleic acid sequence
ttcacctttgacacatatgccatgaat

SEQ ID NO: 901 - protein, 19 aa, Artificial Sequence
  Description of Artificial Sequence: Synthetic Heavy chain variable region CDR H2 amino acid sequence
RIRSKYNNYATYYADSVKD

SEQ ID NO: 902 - DNA, 57 bp, Artificial Sequence; identical to SEQ ID NO: 6
  Description of Artificial Sequence: Synthetic Heavy chain variable region CDR H2 nucleic acid sequence

SEQ ID NO: 903 - protein, 16 aa, Artificial Sequence
  Description of Artificial Sequence: Synthetic Heavy chain variable region CDR H3 amino acid sequence
VRHGNFGNGYVSWFAH

SEQ ID NO: 904 - DNA, 48 bp, Artificial Sequence; identical to SEQ ID NO: 24
  Description of Artificial Sequence: Synthetic Heavy chain variable region CDR H3 nucleic acid sequence

SEQ ID NO: 905 - DNA, 327 bp, Artificial Sequence; identical to SEQ ID NO: 793
  Description of Artificial Sequence: Synthetic Light chain variable region nucleic acid sequence

SEQ ID NO: 906 - protein, 109 aa, Artificial Sequence; identical to SEQ ID NO: 794
  Description of Artificial Sequence: Synthetic Light chain variable region amino acid sequence

SEQ ID NO: 907 - protein, 14 aa, Artificial Sequence
  Description of Artificial Sequence: Synthetic Light chain variable region CDR L1 amino acid sequence
GSSTGAVTTSNYAN

SEQ ID NO: 908 - DNA, 42 bp, Artificial Sequence; identical to SEQ ID NO: 204
  Description of Artificial Sequence: Synthetic Light chain variable region CDR L1 nucleic acid sequence

SEQ ID NO: 909 - protein, 7 aa, Artificial Sequence
  Description of Artificial Sequence: Synthetic Light chain variable region CDR L2 amino acid sequence
GTDKRAP

SEQ ID NO: 910 - DNA, 21 bp, Artificial Sequence
  Description of Artificial Sequence: Synthetic Light chain variable region CDR L2 nucleic acid sequence
ggcacagacaagcgcgctcct

SEQ ID NO: 911 - protein, 9 aa, Artificial Sequence
  Description of Artificial Sequence: Synthetic Light chain variable region CDR L3 amino acid sequence
ALWYSNHWV

SEQ ID NO: 912 - DNA, 27 bp, Artificial Sequence
  Description of Artificial Sequence: Synthetic Light chain variable region CDR L3 nucleic acid sequence
gcgctgtggtacagtaaccattgggtg

SEQ ID NO: 913 - DNA, 375 bp, Artificial Sequence; identical to SEQ ID NO: 785
  Description of Artificial Sequence: Synthetic Heavy chain variable region nucleic acid sequence

SEQ ID NO: 914 - protein, 125 aa, Artificial Sequence; identical to SEQ ID NO: 786
  Description of Artificial Sequence: Synthetic Heavy chain variable region amino acid sequence

SEQ ID NO: 915 - protein, 9 aa, Artificial Sequence
  Description of Artificial Sequence: Synthetic Heavy chain variable region CDR H1 amino acid sequence
FTFDTYAMN

SEQ ID NO: 916 - DNA, 27 bp, Artificial Sequence
  Description of Artificial Sequence: Synthetic Heavy chain variable region CDR H1 nucleic acid sequence
ttcacctttgacacatatgccatgaat

SEQ ID NO: 917 - protein, 19 aa, Artificial Sequence
  Description of Artificial Sequence: Synthetic Heavy chain variable region CDR H2 amino acid sequence
RIRSKYNNYATYYADSVKD

SEQ ID NO: 918 - DNA, 57 bp, Artificial Sequence; identical to SEQ ID NO: 6
  Description of Artificial Sequence: Synthetic Heavy chain variable region CDR H2 nucleic acid sequence

SEQ ID NO: 919 - protein, 16 aa, Artificial Sequence
  Description of Artificial Sequence: Synthetic Heavy chain variable region CDR H3 amino acid sequence
VRHGNFGNGYVSWFAH

SEQ ID NO: 920 - DNA, 48 bp, Artificial Sequence; identical to SEQ ID NO: 24
  Description of Artificial Sequence: Synthetic Heavy chain variable region CDR H3 nucleic acid sequence

SEQ ID NO: 921 - DNA, 327 bp, Artificial Sequence; identical to SEQ ID NO: 793
  Description of Artificial Sequence: Synthetic Light chain variable region nucleic acid sequence

SEQ ID NO: 922 - protein, 109 aa, Artificial Sequence; identical to SEQ ID NO: 794
  Description of Artificial Sequence: Synthetic Light chain variable region amino acid sequence

SEQ ID NO: 923 - protein, 14 aa, Artificial Sequence
  Description of Artificial Sequence: Synthetic Light chain variable region CDR L1 amino acid sequence
GSSTGAVTTSNYAN

SEQ ID NO: 924 - DNA, 42 bp, Artificial Sequence; identical to SEQ ID NO: 204
  Description of Artificial Sequence: Synthetic Light chain variable region CDR L1 nucleic acid sequence

SEQ ID NO: 925 - protein, 7 aa, Artificial Sequence
  Description of Artificial Sequence: Synthetic Light chain variable region CDR L2 amino acid sequence
GTDKRAP

SEQ ID NO: 926 - DNA, 21 bp, Artificial Sequence
  Description of Artificial Sequence: Synthetic Light chain variable region CDR L2 nucleic acid sequence
ggcacagacaagcgcgctcct

SEQ ID NO: 927 - protein, 9 aa, Artificial Sequence
  Description of Artificial Sequence: Synthetic Light chain variable region CDR L3 amino acid sequence
ALWYSNHWV

SEQ ID NO: 928 - DNA, 27 bp, Artificial Sequence
  Description of Artificial Sequence: Synthetic Light chain variable region CDR L3 nucleic acid sequence
gcgctgtggtacagtaaccattgggtg

SEQ ID NO: 929 - DNA, 375 bp, Artificial Sequence; identical to SEQ ID NO: 785
  Description of Artificial Sequence: Synthetic Heavy chain variable region nucleic acid sequence

SEQ ID NO: 930 - protein, 125 aa, Artificial Sequence; identical to SEQ ID NO: 786
  Description of Artificial Sequence: Synthetic Heavy chain variable region amino acid sequence

SEQ ID NO: 931 - protein, 9 aa, Artificial Sequence
  Description of Artificial Sequence: Synthetic Heavy chain variable region CDR H1 amino acid sequence
FTFDTYAMN

SEQ ID NO: 932 - DNA, 27 bp, Artificial Sequence
  Description of Artificial Sequence: Synthetic Heavy chain variable region CDR H1 nucleic acid sequence
ttcacctttgacacatatgccatgaat

SEQ ID NO: 933 - protein, 19 aa, Artificial Sequence
  Description of Artificial Sequence: Synthetic Heavy chain variable region CDR H2 amino acid sequence
RIRSKYNNYATYYADSVKD

SEQ ID NO: 934 - DNA, 57 bp, Artificial Sequence; identical to SEQ ID NO: 6
  Description of Artificial Sequence: Synthetic Heavy chain variable region CDR H2 nucleic acid sequence

SEQ ID NO: 935 - protein, 16 aa, Artificial Sequence
  Description of Artificial Sequence: Synthetic Heavy chain variable region CDR H3 amino acid sequence
VRHGNFGNGYVSWFAH

SEQ ID NO: 936 - DNA, 48 bp, Artificial Sequence; identical to SEQ ID NO: 24
  Description of Artificial Sequence: Synthetic Heavy chain variable region CDR H3 nucleic acid sequence

SEQ ID NO: 937 - DNA, 327 bp, Artificial Sequence; identical to SEQ ID NO: 793
  Description of Artificial Sequence: Synthetic Light chain variable region nucleic acid sequence

SEQ ID NO: 938 - protein, 109 aa, Artificial Sequence; identical to SEQ ID NO: 794
  Description of Artificial Sequence: Synthetic Light chain variable region amino acid sequence

SEQ ID NO: 939 - protein, 14 aa, Artificial Sequence
  Description of Artificial Sequence: Synthetic Light chain variable region CDR L1 amino acid sequence
GSSTGAVTTSNYAN

SEQ ID NO: 940 - DNA, 42 bp, Artificial Sequence; identical to SEQ ID NO: 204
  Description of Artificial Sequence: Synthetic Light chain variable region CDR L1 nucleic acid sequence

SEQ ID NO: 941 - protein, 7 aa, Artificial Sequence
  Description of Artificial Sequence: Synthetic Light chain variable region CDR L2 amino acid sequence
GTDKRAP

SEQ ID NO: 942 - DNA, 21 bp, Artificial Sequence
  Description of Artificial Sequence: Synthetic Light chain variable region CDR L2 nucleic acid sequence
ggcacagacaagcgcgctcct

SEQ ID NO: 943 - protein, 9 aa, Artificial Sequence
  Description of Artificial Sequence: Synthetic Light chain variable region CDR L3 amino acid sequence
ALWYSNHWV

SEQ ID NO: 944 - DNA, 27 bp, Artificial Sequence
  Description of Artificial Sequence: Synthetic Light chain variable region CDR L3 nucleic acid sequence
gcgctgtggtacagtaaccattgggtg

SEQ ID NO: 945 - DNA, 375 bp, Artificial Sequence; identical to SEQ ID NO: 785
  Description of Artificial Sequence: Synthetic Heavy chain variable region nucleic acid sequence

SEQ ID NO: 946 - protein, 125 aa, Artificial Sequence; identical to SEQ ID NO: 786
  Description of Artificial Sequence: Synthetic Heavy chain variable region amino acid sequence

SEQ ID NO: 947 - protein, 9 aa, Artificial Sequence
  Description of Artificial Sequence: Synthetic Heavy chain variable region CDR H1 amino acid sequence
FTFDTYAMN

SEQ ID NO: 948 - DNA, 27 bp, Artificial Sequence
  Description of Artificial Sequence: Synthetic Heavy chain variable region CDR H1 nucleic acid sequence
ttcacctttgacacatatgccatgaat

SEQ ID NO: 949 - protein, 19 aa, Artificial Sequence
  Description of Artificial Sequence: Synthetic Heavy chain variable region CDR H2 amino acid sequence
RIRSKYNNYATYYADSVKD

SEQ ID NO: 950 - DNA, 57 bp, Artificial Sequence; identical to SEQ ID NO: 6
  Description of Artificial Sequence: Synthetic Heavy chain variable region CDR H2 nucleic acid sequence

SEQ ID NO: 951 - protein, 16 aa, Artificial Sequence
  Description of Artificial Sequence: Synthetic Heavy chain variable region CDR H3 amino acid sequence
VRHGNFGNGYVSWFAH

SEQ ID NO: 952 - DNA, 48 bp, Artificial Sequence; identical to SEQ ID NO: 24
  Description of Artificial Sequence: Synthetic Heavy chain variable region CDR H3 nucleic acid sequence

SEQ ID NO: 953 - DNA, 327 bp, Artificial Sequence
  Description of Artificial Sequence: Synthetic Light chain variable region nucleic acid sequence
cagactgtggtgacccaggagccatcgctctcagtgtcccctggagggacagtcacactcacttgtggatcaagcactggcgcagtcactactagtaactacgccaactgggtccagcagaccccaggccaggctccgcgcggactcatcggcggcacagacaagcgcgctcctggggtccctgatctcttctctggctccctgcttggggacaaagctgccctcaccatcacgggggcccaggcagaggatgaagctgattattactgtgcgctgtggtacagtaaccattgggtgttcggctgtgggaccaagctgaccgtccta

SEQ ID NO: 954 - protein, 109 aa, Artificial Sequence
  Description of Artificial Sequence: Synthetic Light chain variable region amino acid sequence
QTVVTQEPSLSVSPGGTVTLTCGSSTGAVTTSNYANWVQQTPGQAPRGLIGGTDKRAPGVPDLFSGSLLGDKAALTITGAQAEDEADYYCALWYSNHWVFGCGTKLTVL

SEQ ID NO: 955 - protein, 14 aa, Artificial Sequence
  Description of Artificial Sequence: Synthetic Light chain variable region CDR L1 amino acid sequence
GSSTGAVTTSNYAN

SEQ ID NO: 956 - DNA, 42 bp, Artificial Sequence; identical to SEQ ID NO: 204
  Description of Artificial Sequence: Synthetic Light chain variable region CDR L1 nucleic acid sequence

SEQ ID NO: 957 - protein, 7 aa, Artificial Sequence
  Description of Artificial Sequence: Synthetic Light chain variable region CDR L2 amino acid sequence
GTDKRAP

SEQ ID NO: 958 - DNA, 21 bp, Artificial Sequence
  Description of Artificial Sequence: Synthetic Light chain variable region CDR L2 nucleic acid sequence
ggcacagacaagcgcgctcct

SEQ ID NO: 959 - protein, 9 aa, Artificial Sequence
  Description of Artificial Sequence: Synthetic Light chain variable region CDR L3 amino acid sequence
ALWYSNHWV

SEQ ID NO: 960 - DNA, 27 bp, Artificial Sequence
  Description of Artificial Sequence: Synthetic Light chain variable region CDR L3 nucleic acid sequence
gcgctgtggtacagtaaccattgggtg

SEQ ID NO: 961 - DNA, 375 bp, Artificial Sequence; identical to SEQ ID NO: 785
  Description of Artificial Sequence: Synthetic Heavy chain variable region nucleic acid sequence

SEQ ID NO: 962 - protein, 125 aa, Artificial Sequence; identical to SEQ ID NO: 786
  Description of Artificial Sequence: Synthetic Heavy chain variable region amino acid sequence

SEQ ID NO: 963 - protein, 9 aa, Artificial Sequence
  Description of Artificial Sequence: Synthetic Heavy chain variable region CDR H1 amino acid sequence
FTFDTYAMN

SEQ ID NO: 964 - DNA, 27 bp, Artificial Sequence
  Description of Artificial Sequence: Synthetic Heavy chain variable region CDR H1 nucleic acid sequence
ttcacctttgacacatatgccatgaat

SEQ ID NO: 965 - protein, 19 aa, Artificial Sequence
  Description of Artificial Sequence: Synthetic Heavy chain variable region CDR H2 amino acid sequence
RIRSKYNNYATYYADSVKD

SEQ ID NO: 966 - DNA, 57 bp, Artificial Sequence; identical to SEQ ID NO: 6
  Description of Artificial Sequence: Synthetic Heavy chain variable region CDR H2 nucleic acid sequence

SEQ ID NO: 967 - protein, 16 aa, Artificial Sequence
  Description of Artificial Sequence: Synthetic Heavy chain variable region CDR H3 amino acid sequence
VRHGNFGNGYVSWFAH

SEQ ID NO: 968 - DNA, 48 bp, Artificial Sequence; identical to SEQ ID NO: 24
  Description of Artificial Sequence: Synthetic Heavy chain variable region CDR H3 nucleic acid sequence

SEQ ID NO: 969 - DNA, 327 bp, Artificial Sequence; identical to SEQ ID NO: 793
  Description of Artificial Sequence: Synthetic Light chain variable region nucleic acid sequence

SEQ ID NO: 970 - protein, 109 aa, Artificial Sequence; identical to SEQ ID NO: 794
  Description of Artificial Sequence: Synthetic Light chain variable region amino acid sequence

SEQ ID NO: 971 - protein, 14 aa, Artificial Sequence
  Description of Artificial Sequence: Synthetic Light chain variable region CDR L1 amino acid sequence
GSSTGAVTTSNYAN

SEQ ID NO: 972 - DNA, 42 bp, Artificial Sequence; identical to SEQ ID NO: 204
  Description of Artificial Sequence: Synthetic Light chain variable region CDR L1 nucleic acid sequence

SEQ ID NO: 973 - protein, 7 aa, Artificial Sequence
  Description of Artificial Sequence: Synthetic Light chain variable region CDR L2 amino acid sequence
GTDKRAP

SEQ ID NO: 974 - DNA, 21 bp, Artificial Sequence
  Description of Artificial Sequence: Synthetic Light chain variable region CDR L2 nucleic acid sequence
ggcacagacaagcgcgctcct

SEQ ID NO: 975 - protein, 9 aa, Artificial Sequence
  Description of Artificial Sequence: Synthetic Light chain variable region CDR L3 amino acid sequence
ALWYSNHWV

SEQ ID NO: 976 - DNA, 27 bp, Artificial Sequence
  Description of Artificial Sequence: Synthetic Light chain variable region CDR L3 nucleic acid sequence
gcgctgtggtacagtaaccattgggtg

SEQ ID NO: 977 - DNA, 375 bp, Artificial Sequence; identical to SEQ ID NO: 785
  Description of Artificial Sequence: Synthetic Heavy chain variable region nucleic acid sequence

SEQ ID NO: 978 - protein, 125 aa, Artificial Sequence; identical to SEQ ID NO: 786
  Description of Artificial Sequence: Synthetic Heavy chain variable region amino acid sequence

SEQ ID NO: 979 - protein, 9 aa, Artificial Sequence
  Description of Artificial Sequence: Synthetic Heavy chain variable region CDR H1 amino acid sequence
FTFDTYAMN

SEQ ID NO: 980 - DNA, 27 bp, Artificial Sequence
  Description of Artificial Sequence: Synthetic Heavy chain variable region CDR H1 nucleic acid sequence
ttcacctttgacacatatgccatgaat

SEQ ID NO: 981 - protein, 19 aa, Artificial Sequence
  Description of Artificial Sequence: Synthetic Heavy chain variable region CDR H2 amino acid sequence
RIRSKYNNYATYYADSVKD

SEQ ID NO: 982 - DNA, 57 bp, Artificial Sequence; identical to SEQ ID NO: 6
  Description of Artificial Sequence: Synthetic Heavy chain variable region CDR H2 nucleic acid sequence

SEQ ID NO: 983 - protein, 16 aa, Artificial Sequence
  Description of Artificial Sequence: Synthetic Heavy chain variable region CDR H3 amino acid sequence
VRHGNFGNGYVSWFAH

SEQ ID NO: 984 - DNA, 48 bp, Artificial Sequence; identical to SEQ ID NO: 24
  Description of Artificial Sequence: Synthetic Heavy chain variable region CDR H3 nucleic acid sequence

SEQ ID NO: 985 - DNA, 327 bp, Artificial Sequence; identical to SEQ ID NO: 793
  Description of Artificial Sequence: Synthetic Light chain variable region nucleic acid sequence

SEQ ID NO: 986 - protein, 109 aa, Artificial Sequence; identical to SEQ ID NO: 794
  Description of Artificial Sequence: Synthetic Light chain variable region amino acid sequence

SEQ ID NO: 987 - protein, 14 aa, Artificial Sequence
  Description of Artificial Sequence: Synthetic Light chain variable region CDR L1 amino acid sequence
GSSTGAVTTSNYAN

SEQ ID NO: 988 - DNA, 42 bp, Artificial Sequence; identical to SEQ ID NO: 204
  Description of Artificial Sequence: Synthetic Light chain variable region CDR L1 nucleic acid sequence

SEQ ID NO: 989 - protein, 7 aa, Artificial Sequence
  Description of Artificial Sequence: Synthetic Light chain variable region CDR L2 amino acid sequence
GTDKRAP

SEQ ID NO: 990 - DNA, 21 bp, Artificial Sequence
  Description of Artificial Sequence: Synthetic Light chain variable region CDR L2 nucleic acid sequence
ggcacagacaagcgcgctcct

SEQ ID NO: 991 - protein, 9 aa, Artificial Sequence
  Description of Artificial Sequence: Synthetic Light chain variable region CDR L3 amino acid sequence
ALWYSNHWV

SEQ ID NO: 992 - DNA, 27 bp, Artificial Sequence
  Description of Artificial Sequence: Synthetic Light chain variable region CDR L3 nucleic acid sequence
gcgctgtggtacagtaaccattgggtg

SEQ ID NO: 993 - DNA, 375 bp, Artificial Sequence; identical to SEQ ID NO: 785
  Description of Artificial Sequence: Synthetic Heavy chain variable region nucleic acid sequence

SEQ ID NO: 994 - protein, 125 aa, Artificial Sequence; identical to SEQ ID NO: 786
  Description of Artificial Sequence: Synthetic Heavy chain variable region amino acid sequence

SEQ ID NO: 995 - protein, 9 aa, Artificial Sequence
  Description of Artificial Sequence: Synthetic Heavy chain variable region CDR H1 amino acid sequence
FTFDTYAMN

SEQ ID NO: 996 - DNA, 27 bp, Artificial Sequence
  Description of Artificial Sequence: Synthetic Heavy chain variable region CDR H1 nucleic acid sequence
ttcacctttgacacatatgccatgaat

SEQ ID NO: 997 - protein, 19 aa, Artificial Sequence
  Description of Artificial Sequence: Synthetic Heavy chain variable region CDR H2 amino acid sequence
RIRSKYNNYATYYADSVKD

SEQ ID NO: 998 - DNA, 57 bp, Artificial Sequence; identical to SEQ ID NO: 6
  Description of Artificial Sequence: Synthetic Heavy chain variable region CDR H2 nucleic acid sequence

SEQ ID NO: 999 - protein, 16 aa, Artificial Sequence
  Description of Artificial Sequence: Synthetic Heavy chain variable region CDR H3 amino acid sequence
VRHGNFGNGYVSWFAH

SEQ ID NO: 1000 - DNA, 48 bp, Artificial Sequence; identical to SEQ ID NO: 24
  Description of Artificial Sequence: Synthetic Heavy chain variable region CDR H3 nucleic acid sequence

SEQ ID NO: 1001 - DNA, 327 bp, Artificial Sequence; identical to SEQ ID NO: 793
  Description of Artificial Sequence: Synthetic Light chain variable region nucleic acid sequence

SEQ ID NO: 1002 - protein, 109 aa, Artificial Sequence; identical to SEQ ID NO: 794
  Description of Artificial Sequence: Synthetic Light chain variable region amino acid sequence

SEQ ID NO: 1003 - protein, 14 aa, Artificial Sequence
  Description of Artificial Sequence: Synthetic Light chain variable region CDR L1 amino acid sequence
GSSTGAVTTSNYAN

SEQ ID NO: 1004 - DNA, 42 bp, Artificial Sequence; identical to SEQ ID NO: 204
  Description of Artificial Sequence: Synthetic Light chain variable region CDR L1 nucleic acid sequence

SEQ ID NO: 1005 - protein, 7 aa, Artificial Sequence
  Description of Artificial Sequence: Synthetic Light chain variable region CDR L2 amino acid sequence
GTDKRAP

SEQ ID NO: 1006 - DNA, 21 bp, Artificial Sequence
  Description of Artificial Sequence: Synthetic Light chain variable region CDR L2 nucleic acid sequence
ggcacagacaagcgcgctcct

SEQ ID NO: 1007 - protein, 9 aa, Artificial Sequence
  Description of Artificial Sequence: Synthetic Light chain variable region CDR L3 amino acid sequence
ALWYSNHWV

SEQ ID NO: 1008 - DNA, 27 bp, Artificial Sequence
  Description of Artificial Sequence: Synthetic Light chain variable region CDR L3 nucleic acid sequence
gcgctgtggtacagtaaccattgggtg

SEQ ID NO: 1009 - DNA, 375 bp, Artificial Sequence; identical to SEQ ID NO: 785
  Description of Artificial Sequence: Synthetic Heavy chain variable region nucleic acid sequence

SEQ ID NO: 1010 - protein, 125 aa, Artificial Sequence; identical to SEQ ID NO: 786
  Description of Artificial Sequence: Synthetic Heavy chain variable region amino acid sequence

SEQ ID NO: 1011 - protein, 9 aa, Artificial Sequence
  Description of Artificial Sequence: Synthetic Heavy chain variable region CDR H1 amino acid sequence
FTFDTYAMN

SEQ ID NO: 1012 - DNA, 27 bp, Artificial Sequence
  Description of Artificial Sequence: Synthetic Heavy chain variable region CDR H1 nucleic acid sequence
ttcacctttgacacatatgccatgaat

SEQ ID NO: 1013 - protein, 19 aa, Artificial Sequence
  Description of Artificial Sequence: Synthetic Heavy chain variable region CDR H2 amino acid sequence
RIRSKYNNYATYYADSVKD

SEQ ID NO: 1014 - DNA, 57 bp, Artificial Sequence; identical to SEQ ID NO: 6
  Description of Artificial Sequence: Synthetic Heavy chain variable region CDR H2 nucleic acid sequence

SEQ ID NO: 1015 - protein, 16 aa, Artificial Sequence
  Description of Artificial Sequence: Synthetic Heavy chain variable region CDR H3 amino acid sequence
VRHGNFGNGYVSWFAH

SEQ ID NO: 1016 - DNA, 48 bp, Artificial Sequence; identical to SEQ ID NO: 24
  Description of Artificial Sequence: Synthetic Heavy chain variable region CDR H3 nucleic acid sequence

SEQ ID NO: 1017 - DNA, 327 bp, Artificial Sequence; identical to SEQ ID NO: 793
  Description of Artificial Sequence: Synthetic Light chain variable region nucleic acid sequence

SEQ ID NO: 1018 - protein, 109 aa, Artificial Sequence; identical to SEQ ID NO: 794
  Description of Artificial Sequence: Synthetic Light chain variable region amino acid sequence

SEQ ID NO: 1019 - protein, 14 aa, Artificial Sequence
  Description of Artificial Sequence: Synthetic Light chain variable region CDR L1 amino acid sequence
GSSTGAVTTSNYAN

SEQ ID NO: 1020 - DNA, 42 bp, Artificial Sequence; identical to SEQ ID NO: 204
  Description of Artificial Sequence: Synthetic Light chain variable region CDR L1 nucleic acid sequence

SEQ ID NO: 1021 - protein, 7 aa, Artificial Sequence
  Description of Artificial Sequence: Synthetic Light chain variable region CDR L2 amino acid sequence
GTDKRAP

SEQ ID NO: 1022 - DNA, 21 bp, Artificial Sequence
  Description of Artificial Sequence: Synthetic Light chain variable region CDR L2 nucleic acid sequence
ggcacagacaagcgcgctcct

SEQ ID NO: 1023 - protein, 9 aa, Artificial Sequence
  Description of Artificial Sequence: Synthetic Light chain variable region CDR L3 amino acid sequence
ALWYSNHWV

SEQ ID NO: 1024 - DNA, 27 bp, Artificial Sequence
  Description of Artificial Sequence: Synthetic Light chain variable region CDR L3 nucleic acid sequence
gcgctgtggtacagtaaccattgggtg

SEQ ID NO: 1025 - DNA, 375 bp, Artificial Sequence
  Description of Artificial Sequence: Synthetic Heavy chain variable region nucleic acid sequence
gaggtgcagctgttggagtctgggggaggcttggtacagcctggggggtccctgagactctcctgtgcagcctctggattcacctttgacacatatgccatgaattgggttcgccaggctccagggggatgtctggagtgggtcgcaaggattagatccaagtataacaattacgctacatactacgcagactccgtgaaggatcggttcaccatctccagagacgattccaagagcacgctgtatctgcaaatgaacagcctgagagccgaggacacggcggtgtactactgcgtcaggcacggtaacttcgggaacggttacgtatcctggtttgctcattggggccaaggaaccctggtcaccgtctcctca

SEQ ID NO: 1026 - protein, 125 aa, Artificial Sequence
  Description of Artificial Sequence: Synthetic Heavy chain variable region amino acid sequence
EVQLLESGGGLVQPGGSLRLSCAASGFTFDTYAMNWVRQAPGGCLEWVARIRSKYNNYATYYADSVKDRFTISRDDSKSTLYLQMNSLRAEDTAVYYCVRHGNFGNGYVSWFAHWGQGTLVTVSS

SEQ ID NO: 1027 - protein, 9 aa, Artificial Sequence
  Description of Artificial Sequence: Synthetic Heavy chain variable region CDR H1 amino acid sequence
FTFDTYAMN

SEQ ID NO: 1028 - DNA, 27 bp, Artificial Sequence
  Description of Artificial Sequence: Synthetic Heavy chain variable region CDR H1 nucleic acid sequence
ttcacctttgacacatatgccatgaat

SEQ ID NO: 1029 - protein, 19 aa, Artificial Sequence
  Description of Artificial Sequence: Synthetic Heavy chain variable region CDR H2 amino acid sequence
RIRSKYNNYATYYADSVKD

SEQ ID NO: 1030 - DNA, 57 bp, Artificial Sequence; identical to SEQ ID NO: 6
  Description of Artificial Sequence: Synthetic Heavy chain variable region CDR H2 nucleic acid sequence

SEQ ID NO: 1031 - protein, 16 aa, Artificial Sequence
  Description of Artificial Sequence: Synthetic Heavy chain variable region CDR H3 amino acid sequence
VRHGNFGNGYVSWFAH

SEQ ID NO: 1032 - DNA, 48 bp, Artificial Sequence; identical to SEQ ID NO: 24
  Description of Artificial Sequence: Synthetic Heavy chain variable region CDR H3 nucleic acid sequence

SEQ ID NO: 1033 - DNA, 327 bp, Artificial Sequence; identical to SEQ ID NO: 793
  Description of Artificial Sequence: Synthetic Light chain variable region nucleic acid sequence

SEQ ID NO: 1034 - protein, 109 aa, Artificial Sequence; identical to SEQ ID NO: 794
  Description of Artificial Sequence: Synthetic Light chain variable region amino acid sequence

SEQ ID NO: 1035 - protein, 14 aa, Artificial Sequence
  Description of Artificial Sequence: Synthetic Light chain variable region CDR L1 amino acid sequence
GSSTGAVTTSNYAN

SEQ ID NO: 1036 - DNA, 42 bp, Artificial Sequence; identical to SEQ ID NO: 204
  Description of Artificial Sequence: Synthetic Light chain variable region CDR L1 nucleic acid sequence

SEQ ID NO: 1037 - protein, 7 aa, Artificial Sequence
  Description of Artificial Sequence: Synthetic Light chain variable region CDR L2 amino acid sequence
GTDKRAP

SEQ ID NO: 1038 - DNA, 21 bp, Artificial Sequence
  Description of Artificial Sequence: Synthetic Light chain variable region CDR L2 nucleic acid sequence
ggcacagacaagcgcgctcct

SEQ ID NO: 1039 - protein, 9 aa, Artificial Sequence
  Description of Artificial Sequence: Synthetic Light chain variable region CDR L3 amino acid sequence
ALWYSNHWV

SEQ ID NO: 1040 - DNA, 27 bp, Artificial Sequence
  Description of Artificial Sequence: Synthetic Light chain variable region CDR L3 nucleic acid sequence
gcgctgtggtacagtaaccattgggtg

SEQ ID NO: 1041 - DNA, 375 bp, Artificial Sequence; identical to SEQ ID NO: 1025
  Description of Artificial Sequence: Synthetic Heavy chain variable region nucleic acid sequence

SEQ ID NO: 1042 - protein, 125 aa, Artificial Sequence; identical to SEQ ID NO: 1026
  Description of Artificial Sequence: Synthetic Heavy chain variable region amino acid sequence

SEQ ID NO: 1043 - protein, 9 aa, Artificial Sequence
  Description of Artificial Sequence: Synthetic Heavy chain variable region CDR H1 amino acid sequence
FTFDTYAMN

SEQ ID NO: 1044 - DNA, 27 bp, Artificial Sequence
  Description of Artificial Sequence: Synthetic Heavy chain variable region CDR H1 nucleic acid sequence
ttcacctttgacacatatgccatgaat

SEQ ID NO: 1045 - protein, 19 aa, Artificial Sequence
  Description of Artificial Sequence: Synthetic Heavy chain variable region CDR H2 amino acid sequence
RIRSKYNNYATYYADSVKD

SEQ ID NO: 1046 - DNA, 57 bp, Artificial Sequence; identical to SEQ ID NO: 6
  Description of Artificial Sequence: Synthetic Heavy chain variable region CDR H2 nucleic acid sequence

SEQ ID NO: 1047 - protein, 16 aa, Artificial Sequence
  Description of Artificial Sequence: Synthetic Heavy chain variable region CDR H3 amino acid sequence
VRHGNFGNGYVSWFAH

SEQ ID NO: 1048 - DNA, 48 bp, Artificial Sequence; identical to SEQ ID NO: 24
  Description of Artificial Sequence: Synthetic Heavy chain variable region CDR H3 nucleic acid sequence

SEQ ID NO: 1049 - DNA, 327 bp, Artificial Sequence
  Description of Artificial Sequence: Synthetic Light chain variable region nucleic acid sequence
cagactgtggtgacccaggagccatcgctctcagtgtcccctggagggacagtcacactcacttgtggatcaagcactggcgcagtcactactagtaactacgccaactgggtccagcagaccccaggccaggctccgcgcggactcatcggcggcacagacaagcgcgctcctggggtccttgatctcttctctggctccctgcttggggacaaagctgccctcaccatcacgggggcccaggcagaggatgaagctgattattactgtgcgctgtggtacagtaaccattgggtgttcggctgtgggaccaagctgaccgtccta

SEQ ID NO: 1050 - protein, 109 aa, Artificial Sequence
  Description of Artificial Sequence: Synthetic Light chain variable region amino acid sequence
QTVVTQEPSLSVSPGGTVTLTCGSSTGAVTTSNYANWVQQTPGQAPRGLIGGTDKRAPGVLDLFSGSLLGDKAALTITGAQAEDEADYYCALWYSNHWVFGCGTKLTVL

SEQ ID NO: 1051 - protein, 14 aa, Artificial Sequence
  Description of Artificial Sequence: Synthetic Light chain variable region CDR L1 amino acid sequence
GSSTGAVTTSNYAN

SEQ ID NO: 1052 - DNA, 42 bp, Artificial Sequence; identical to SEQ ID NO: 204
  Description of Artificial Sequence: Synthetic Light chain variable region CDR L1 nucleic acid sequence

SEQ ID NO: 1053 - protein, 7 aa, Artificial Sequence
  Description of Artificial Sequence: Synthetic Light chain variable region CDR L2 amino acid sequence
GTDKRAP

SEQ ID NO: 1054 - DNA, 21 bp, Artificial Sequence
  Description of Artificial Sequence: Synthetic Light chain variable region CDR L2 nucleic acid sequence
ggcacagacaagcgcgctcct

SEQ ID NO: 1055 - protein, 9 aa, Artificial Sequence
  Description of Artificial Sequence: Synthetic Light chain variable region CDR L3 amino acid sequence
ALWYSNHWV

SEQ ID NO: 1056 - DNA, 27 bp, Artificial Sequence
  Description of Artificial Sequence: Synthetic Light chain variable region CDR L3 nucleic acid sequence
gcgctgtggtacagtaaccattgggtg

SEQ ID NO: 1057 - DNA, 375 bp, Artificial Sequence
  Description of Artificial Sequence: Synthetic Heavy chain variable region nucleic acid sequence
gaggtgcagctgttggagtctgggggaggcttggtacagcctggggggtccctgagactctcctgtgcagcctctggattcacctttgacacatatgccatgaactgggtgcgccaggctccagggaaggggctggagtgggtcgcaaggattagatccaagtataacaattacgctacatactacgcagactccgtgaaggatcggttcaccatctccagagacgattccaagagcacgctgtatctgcaaatggaaagcctgagagccgaggacacggcggtgtactactgcgtcaggcacggtaacttccagggtggttacgtatcctggtttgctcattggggccaaggaaccctggtcaccgtctcctca

SEQ ID NO: 1058 - protein, 125 aa, Artificial Sequence
  Description of Artificial Sequence: Synthetic Heavy chain variable region amino acid sequence
EVQLLESGGGLVQPGGSLRLSCAASGFTFDTYAMNWVRQAPGKGLEWVARIRSKYNNYATYYADSVKDRFTISRDDSKSTLYLQMESLRAEDTAVYYCVRHGNFQGGYVSWFAHWGQGTLVTVSS

SEQ ID NO: 1059 - protein, 9 aa, Artificial Sequence
  Description of Artificial Sequence: Synthetic Heavy chain variable region CDR H1 amino acid sequence
FTFDTYAMN

SEQ ID NO: 1060 - DNA, 27 bp, Artificial Sequence
  Description of Artificial Sequence: Synthetic Heavy chain variable region CDR H1 nucleic acid sequence
ttcacctttgacacatatgccatgaac

SEQ ID NO: 1061 - protein, 19 aa, Artificial Sequence
  Description of Artificial Sequence: Synthetic Heavy chain variable region CDR H2 amino acid sequence
RIRSKYNNYATYYADSVKD

SEQ ID NO: 1062 - DNA, 57 bp, Artificial Sequence; identical to SEQ ID NO: 6
  Description of Artificial Sequence: Synthetic Heavy chain variable region CDR H2 nucleic acid sequence

SEQ ID NO: 1063 - protein, 16 aa, Artificial Sequence
  Description of Artificial Sequence: Synthetic Heavy chain variable region CDR H3 amino acid sequence
VRHGNFQGGYVSWFAH

SEQ ID NO: 1064 - DNA, 48 bp, Artificial Sequence
  Description of Artificial Sequence: Synthetic Heavy chain variable region CDR H3 nucleic acid sequence
gtcaggcacggtaacttccagggtggttacgtatcctggtttgctcat

SEQ ID NO: 1065 - DNA, 327 bp, Artificial Sequence; identical to SEQ ID NO: 345
  Description of Artificial Sequence: Synthetic Light chain variable region nucleic acid sequence

SEQ ID NO: 1066 - protein, 109 aa, Artificial Sequence; identical to SEQ ID NO: 346
  Description of Artificial Sequence: Synthetic Light chain variable region amino acid sequence

SEQ ID NO: 1067 - protein, 14 aa, Artificial Sequence
  Description of Artificial Sequence: Synthetic Light chain variable region CDR L1 amino acid sequence
GSSTGAVTTSNYAN

SEQ ID NO: 1068 - DNA, 42 bp, Artificial Sequence; identical to SEQ ID NO: 204
  Description of Artificial Sequence: Synthetic Light chain variable region CDR L1 nucleic acid sequence

SEQ ID NO: 1069 - protein, 7 aa, Artificial Sequence
  Description of Artificial Sequence: Synthetic Light chain variable region CDR L2 amino acid sequence
GTDKRAP

SEQ ID NO: 1070 - DNA, 21 bp, Artificial Sequence
  Description of Artificial Sequence: Synthetic Light chain variable region CDR L2 nucleic acid sequence
ggcacagacaagcgcgctcct

SEQ ID NO: 1071 - protein, 9 aa, Artificial Sequence
  Description of Artificial Sequence: Synthetic Light chain variable region CDR L3 amino acid sequence
ALWYSNHWV

SEQ ID NO: 1072 - DNA, 27 bp, Artificial Sequence
  Description of Artificial Sequence: Synthetic Light chain variable region CDR L3 nucleic acid sequence
gcgctgtggtacagtaaccattgggtg

SEQ ID NO: 1073 - DNA, 375 bp, Artificial Sequence
  Description of Artificial Sequence: Synthetic Heavy chain variable region nucleic acid sequence
gaggtgcagctgttggagtctgggggaggcttggtacagcctggggggtccctgagactctcctgtgcagcctctggattcacctttgacacatatgccatgaactgggtgcgccaggctccagggaaggggctggagtgggtcgcaaggattagatccaagtataacaattacgctacatactacgcagactccgtgaaggatcggttcaccatctccagagacgattccaagagcacgctgtatctgcaaatggaaagcctgagagccgaggacacggcggtgtactactgcgtcaggcacggtaacttcggggggggttacgtatcctggtttgcttggtggggccaaggaaccctggtcaccgtctcctca

SEQ ID NO: 1074 - protein, 125 aa, Artificial Sequence
  Description of Artificial Sequence: Synthetic Heavy chain variable region amino acid sequence
EVQLLESGGGLVQPGGSLRLSCAASGFTFDTYAMNWVRQAPGKGLEWVARIRSKYNNYATYYADSVKDRFTISRDDSKSTLYLQMESLRAEDTAVYYCVRHGNFGGGYVSWFAWWGQGTLVTVSS

SEQ ID NO: 1075 - protein, 9 aa, Artificial Sequence
  Description of Artificial Sequence: Synthetic Heavy chain variable region CDR H1 amino acid sequence
FTFDTYAMN

SEQ ID NO: 1076 - DNA, 27 bp, Artificial Sequence
  Description of Artificial Sequence: Synthetic Heavy chain variable region CDR H1 nucleic acid sequence
ttcacctttgacacatatgccatgaac

SEQ ID NO: 1077 - protein, 19 aa, Artificial Sequence
  Description of Artificial Sequence: Synthetic Heavy chain variable region CDR H2 amino acid sequence
RIRSKYNNYATYYADSVKD

SEQ ID NO: 1078 - DNA, 57 bp, Artificial Sequence; identical to SEQ ID NO: 6
  Description of Artificial Sequence: Synthetic Heavy chain variable region CDR H2 nucleic acid sequence

SEQ ID NO: 1079 - protein, 16 aa, Artificial Sequence
  Description of Artificial Sequence: Synthetic Heavy chain variable region CDR H3 amino acid sequence
VRHGNFGGGYVSWFAW

SEQ ID NO: 1080 - DNA, 48 bp, Artificial Sequence
  Description of Artificial Sequence: Synthetic Heavy chain variable region CDR H3 nucleic acid sequence
gtcaggcacggtaacttcggggggggttacgtatcctggtttgcttgg

SEQ ID NO: 1081 - DNA, 327 bp, Artificial Sequence; identical to SEQ ID NO: 345
  Description of Artificial Sequence: Synthetic Light chain variable region nucleic acid sequence

SEQ ID NO: 1082 - protein, 109 aa, Artificial Sequence; identical to SEQ ID NO: 346
  Description of Artificial Sequence: Synthetic Light chain variable region amino acid sequence

SEQ ID NO: 1083 - protein, 14 aa, Artificial Sequence
  Description of Artificial Sequence: Synthetic Light chain variable region CDR L1 amino acid sequence
GSSTGAVTTSNYAN

SEQ ID NO: 1084 - DNA, 42 bp, Artificial Sequence; identical to SEQ ID NO: 204
  Description of Artificial Sequence: Synthetic Light chain variable region CDR L1 nucleic acid sequence

SEQ ID NO: 1085 - protein, 7 aa, Artificial Sequence
  Description of Artificial Sequence: Synthetic Light chain variable region CDR L2 amino acid sequence
GTDKRAP

SEQ ID NO: 1086 - DNA, 21 bp, Artificial Sequence
  Description of Artificial Sequence: Synthetic Light chain variable region CDR L2 nucleic acid sequence
ggcacagacaagcgcgctcct

SEQ ID NO: 1087 - protein, 9 aa, Artificial Sequence
  Description of Artificial Sequence: Synthetic Light chain variable region CDR L3 amino acid sequence
ALWYSNHWV

SEQ ID NO: 1088 - DNA, 27 bp, Artificial Sequence
  Description of Artificial Sequence: Synthetic Light chain variable region CDR L3 nucleic acid sequence
gcgctgtggtacagtaaccattgggtg

SEQ ID NO: 1089 - DNA, 375 bp, Artificial Sequence
  Description of Artificial Sequence: Synthetic Heavy chain variable region nucleic acid sequence
gaggtgcagctgttggagtctgggggaggcttggtacagcctggggggtccctgagactctcctgtgcagcctctggattcacctttgacacatatgccatgaactgggtgcgccaggctccagggaaggggctggagtgggtcgcaaggattagatccaagtataacaattacgctacatactacgcagactccgtgaaggatcggttcaccatctccagagacgattccaagagcacgctgtatctgcaaatggaaagcctgagagccgaggacacggcggtgtactactgcgtcaggcacgcgaacttcggggcgggttacgtatcctggtttgctcattggggccaaggaaccctggtcaccgtctcctca

SEQ ID NO: 1090 - protein, 125 aa, Artificial Sequence
  Description of Artificial Sequence: Synthetic Heavy chain variable region amino acid sequence
EVQLLESGGGLVQPGGSLRLSCAASGFTFDTYAMNWVRQAPGKGLEWVARIRSKYNNYATYYADSVKDRFTISRDDSKSTLYLQMESLRAEDTAVYYCVRHANFGAGYVSWFAHWGQGTLVTVSS

SEQ ID NO: 1091 - protein, 9 aa, Artificial Sequence
  Description of Artificial Sequence: Synthetic Heavy chain variable region CDR H1 amino acid sequence
FTFDTYAMN

SEQ ID NO: 1092 - DNA, 27 bp, Artificial Sequence
  Description of Artificial Sequence: Synthetic Heavy chain variable region CDR H1 nucleic acid sequence
ttcacctttgacacatatgccatgaac

SEQ ID NO: 1093 - protein, 19 aa, Artificial Sequence
  Description of Artificial Sequence: Synthetic Heavy chain variable region CDR H2 amino acid sequence
RIRSKYNNYATYYADSVKD

SEQ ID NO: 1094 - DNA, 57 bp, Artificial Sequence; identical to SEQ ID NO: 6
  Description of Artificial Sequence: Synthetic Heavy chain variable region CDR H2 nucleic acid sequence

SEQ ID NO: 1095 - protein, 16 aa, Artificial Sequence
  Description of Artificial Sequence: Synthetic Heavy chain variable region CDR H3 amino acid sequence
VRHANFGAGYVSWFAH

SEQ ID NO: 1096 - DNA, 48 bp, Artificial Sequence
  Description of Artificial Sequence: Synthetic Heavy chain variable region CDR H3 nucleic acid sequence
gtcaggcacgcgaacttcggggcgggttacgtatcctggtttgctcat

SEQ ID NO: 1097 - DNA, 327 bp, Artificial Sequence; identical to SEQ ID NO: 345
  Description of Artificial Sequence: Synthetic Light chain variable region nucleic acid sequence

SEQ ID NO: 1098 - protein, 109 aa, Artificial Sequence; identical to SEQ ID NO: 346
  Description of Artificial Sequence: Synthetic Light chain variable region amino acid sequence

SEQ ID NO: 1099 - protein, 14 aa, Artificial Sequence
  Description of Artificial Sequence: Synthetic Light chain variable region CDR L1 amino acid sequence
GSSTGAVTTSNYAN

SEQ ID NO: 1100 - DNA, 42 bp, Artificial Sequence; identical to SEQ ID NO: 204
  Description of Artificial Sequence: Synthetic Light chain variable region CDR L1 nucleic acid sequence

SEQ ID NO: 1101 - protein, 7 aa, Artificial Sequence
  Description of Artificial Sequence: Synthetic Light chain variable region CDR L2 amino acid sequence
GTDKRAP

SEQ ID NO: 1102 - DNA, 21 bp, Artificial Sequence
  Description of Artificial Sequence: Synthetic Light chain variable region CDR L2 nucleic acid sequence
ggcacagacaagcgcgctcct

SEQ ID NO: 1103 - protein, 9 aa, Artificial Sequence
  Description of Artificial Sequence: Synthetic Light chain variable region CDR L3 amino acid sequence
ALWYSNHWV

SEQ ID NO: 1104 - DNA, 27 bp, Artificial Sequence
  Description of Artificial Sequence: Synthetic Light chain variable region CDR L3 nucleic acid sequence
gcgctgtggtacagtaaccattgggtg

SEQ ID NO: 1105 - DNA, 375 bp, Artificial Sequence
  Description of Artificial Sequence: Synthetic Heavy chain variable region nucleic acid sequence
gaggtgcagctgttggagtctgggggaggcttggtacagcctggggggtccctgagactctcctgtgcagcctctggattcacctttgacacatatgccatgaactgggtgcgccaggctccagggaaggggctggagtgggtcgcaaggattagatccaagtataacaattacgctacatactacgcagactccgtgaaggatcggttcaccatctccagagacgattccaagagcacgctgtatctgcaaatggaaagcctgagagccgaggacacggcggtgtactactgcgtcaggcacggtaacttcggggaaggttacgtatcctggtttgctcattggggccaaggaaccctggtcaccgtctcctca

SEQ ID NO: 1106 - protein, 125 aa, Artificial Sequence; identical to SEQ ID NO: 482
  Description of Artificial Sequence: Synthetic Heavy chain variable region amino acid sequence

SEQ ID NO: 1107 - protein, 9 aa, Artificial Sequence
  Description of Artificial Sequence: Synthetic Heavy chain variable region CDR H1 amino acid sequence
FTFDTYAMN

SEQ ID NO: 1108 - DNA, 27 bp, Artificial Sequence
  Description of Artificial Sequence: Synthetic Heavy chain variable region CDR H1 nucleic acid sequence
ttcacctttgacacatatgccatgaac

SEQ ID NO: 1109 - protein, 19 aa, Artificial Sequence
  Description of Artificial Sequence: Synthetic Heavy chain variable region CDR H2 amino acid sequence
RIRSKYNNYATYYADSVKD

SEQ ID NO: 1110 - DNA, 57 bp, Artificial Sequence; identical to SEQ ID NO: 6
  Description of Artificial Sequence: Synthetic Heavy chain variable region CDR H2 nucleic acid sequence

SEQ ID NO: 1111 - protein, 16 aa, Artificial Sequence
  Description of Artificial Sequence: Synthetic Heavy chain variable region CDR H3 amino acid sequence
VRHGNFGEGYVSWFAH

SEQ ID NO: 1112 - DNA, 48 bp, Artificial Sequence; identical to SEQ ID NO: 472
  Description of Artificial Sequence: Synthetic Heavy chain variable region CDR H3 nucleic acid sequence

SEQ ID NO: 1113 - DNA, 327 bp, Artificial Sequence; identical to SEQ ID NO: 345
  Description of Artificial Sequence: Synthetic Light chain variable region nucleic acid sequence

SEQ ID NO: 1114 - protein, 109 aa, Artificial Sequence; identical to SEQ ID NO: 346
  Description of Artificial Sequence: Synthetic Light chain variable region amino acid sequence

SEQ ID NO: 1115 - protein, 14 aa, Artificial Sequence
  Description of Artificial Sequence: Synthetic Light chain variable region CDR L1 amino acid sequence
GSSTGAVTTSNYAN

SEQ ID NO: 1116 - DNA, 42 bp, Artificial Sequence; identical to SEQ ID NO: 204
  Description of Artificial Sequence: Synthetic Light chain variable region CDR L1 nucleic acid sequence

SEQ ID NO: 1117 - protein, 7 aa, Artificial Sequence
  Description of Artificial Sequence: Synthetic Light chain variable region CDR L2 amino acid sequence
GTDKRAP

SEQ ID NO: 1118 - DNA, 21 bp, Artificial Sequence
  Description of Artificial Sequence: Synthetic Light chain variable region CDR L2 nucleic acid sequence
ggcacagacaagcgcgctcct

SEQ ID NO: 1119 - protein, 9 aa, Artificial Sequence
  Description of Artificial Sequence: Synthetic Light chain variable region CDR L3 amino acid sequence
ALWYSNHWV

SEQ ID NO: 1120 - DNA, 27 bp, Artificial Sequence
  Description of Artificial Sequence: Synthetic Light chain variable region CDR L3 nucleic acid sequence
gcgctgtggtacagtaaccattgggtg

SEQ ID NO: 1121 - DNA, 375 bp, Artificial Sequence
  Description of Artificial Sequence: Synthetic Heavy chain variable region nucleic acid sequence
gaggtgcagctgttggagtctgggggaggcttggtacagcctggggggtccctgagactctcctgtgcagcctctggattcacctttgacacatatgccatgaactgggtgcgccaggctccagggaaggggctggagtgggtcgcaaggattagatccaagtataacaattacgctacatactacgcagactccgtgaaggatcggttcaccatctccagagacgattccaagagcacgctgtatctgcaaatggaaagcctgagagccgaggacacggcggtgtactactgcgtcaggcacgataacttcggggctggttacgtatcctggtttgctcattggggccaaggaaccctggtcaccgtctcctca

SEQ ID NO: 1122 - protein, 125 aa, Artificial Sequence
  Description of Artificial Sequence: Synthetic Heavy chain variable region amino acid sequence
EVQLLESGGGLVQPGGSLRLSCAASGFTFDTYAMNWVRQAPGKGLEWVARIRSKYNNYATYYADSVKDRFTISRDDSKSTLYLQMESLRAEDTAVYYCVRHDNFGAGYVSWFAHWGQGTLVTVSS

SEQ ID NO: 1123 - protein, 9 aa, Artificial Sequence
  Description of Artificial Sequence: Synthetic Heavy chain variable region CDR H1 amino acid sequence
FTFDTYAMN

SEQ ID NO: 1124 - DNA, 27 bp, Artificial Sequence
  Description of Artificial Sequence: Synthetic Heavy chain variable region CDR H1 nucleic acid sequence
ttcacctttgacacatatgccatgaac

SEQ ID NO: 1125 - protein, 19 aa, Artificial Sequence
  Description of Artificial Sequence: Synthetic Heavy chain variable region CDR H2 amino acid sequence
RIRSKYNNYATYYADSVKD

SEQ ID NO: 1126 - DNA, 57 bp, Artificial Sequence; identical to SEQ ID NO: 6
  Description of Artificial Sequence: Synthetic Heavy chain variable region CDR H2 nucleic acid sequence

SEQ ID NO: 1127 - protein, 16 aa, Artificial Sequence
  Description of Artificial Sequence: Synthetic Heavy chain variable region CDR H3 amino acid sequence
VRHDNFGAGYVSWFAH

SEQ ID NO: 1128 - DNA, 48 bp, Artificial Sequence
  Description of Artificial Sequence: Synthetic Heavy chain variable region CDR H3 nucleic acid sequence
gtcaggcacgataacttcggggctggttacgtatcctggtttgctcat

SEQ ID NO: 1129 - DNA, 327 bp, Artificial Sequence; identical to SEQ ID NO: 345
  Description of Artificial Sequence: Synthetic Light chain variable region nucleic acid sequence

SEQ ID NO: 1130 - protein, 109 aa, Artificial Sequence; identical to SEQ ID NO: 346
  Description of Artificial Sequence: Synthetic Light chain variable region amino acid sequence

SEQ ID NO: 1131 - protein, 14 aa, Artificial Sequence
  Description of Artificial Sequence: Synthetic Light chain variable region CDR L1 amino acid sequence
GSSTGAVTTSNYAN

SEQ ID NO: 1132 - DNA, 42 bp, Artificial Sequence; identical to SEQ ID NO: 204
  Description of Artificial Sequence: Synthetic Light chain variable region CDR L1 nucleic acid sequence

SEQ ID NO: 1133 - protein, 7 aa, Artificial Sequence
  Description of Artificial Sequence: Synthetic Light chain variable region CDR L2 amino acid sequence
GTDKRAP

SEQ ID NO: 1134 - DNA, 21 bp, Artificial Sequence
  Description of Artificial Sequence: Synthetic Light chain variable region CDR L2 nucleic acid sequence
ggcacagacaagcgcgctcct

SEQ ID NO: 1135 - protein, 9 aa, Artificial Sequence
  Description of Artificial Sequence: Synthetic Light chain variable region CDR L3 amino acid sequence
ALWYSNHWV

SEQ ID NO: 1136 - DNA, 27 bp, Artificial Sequence
  Description of Artificial Sequence: Synthetic Light chain variable region CDR L3 nucleic acid sequence
gcgctgtggtacagtaaccattgggtg

SEQ ID NO: 1137 - DNA, 375 bp, Artificial Sequence
  Description of Artificial Sequence: Synthetic Heavy chain variable region nucleic acid sequence
gaggtgcagctgttggagtctgggggaggcttggtacagcctggggggtccctgagactctcctgtgcagcctctggattcacctttgacacatatgccatgaactgggtgcgccaggctccagggaaggggctggagtgggtcgcaaggattagatccaagtataacaattacgctacatactacgcagactccgtgaaggatcggttcaccatctccagagacgattccaagagcacgctgtatctgcaaatggaaagcctgagagccgaggacacggcggtgtactactgcgtcaggcacggtaacttcggggttggttacgtatcctggtttgcttcttggggccaaggaaccctggtcaccgtctcctca

SEQ ID NO: 1138 - protein, 125 aa, Artificial Sequence
  Description of Artificial Sequence: Synthetic Heavy chain variable region amino acid sequence
EVQLLESGGGLVQPGGSLRLSCAASGFTFDTYAMNWVRQAPGKGLEWVARIRSKYNNYATYYADSVKDRFTISRDDSKSTLYLQMESLRAEDTAVYYCVRHGNFGVGYVSWFASWGQGTLVTVSS

SEQ ID NO: 1139 - protein, 9 aa, Artificial Sequence
  Description of Artificial Sequence: Synthetic Heavy chain variable region CDR H1 amino acid sequence
FTFDTYAMN

SEQ ID NO: 1140 - DNA, 27 bp, Artificial Sequence
  Description of Artificial Sequence: Synthetic Heavy chain variable region CDR H1 nucleic acid sequence
ttcacctttgacacatatgccatgaac

SEQ ID NO: 1141 - protein, 19 aa, Artificial Sequence
  Description of Artificial Sequence: Synthetic Heavy chain variable region CDR H2 amino acid sequence
RIRSKYNNYATYYADSVKD

SEQ ID NO: 1142 - DNA, 57 bp, Artificial Sequence; identical to SEQ ID NO: 6
  Description of Artificial Sequence: Synthetic Heavy chain variable region CDR H2 nucleic acid sequence

SEQ ID NO: 1143 - protein, 16 aa, Artificial Sequence
  Description of Artificial Sequence: Synthetic Heavy chain variable region CDR H3 amino acid sequence
VRHGNFGVGYVSWFAS

SEQ ID NO: 1144 - DNA, 48 bp, Artificial Sequence
  Description of Artificial Sequence: Synthetic Heavy chain variable region CDR H3 nucleic acid sequence
gtcaggcacggtaacttcggggttggttacgtatcctggtttgcttct

SEQ ID NO: 1145 - DNA, 327 bp, Artificial Sequence; identical to SEQ ID NO: 345
  Description of Artificial Sequence: Synthetic Light chain variable region nucleic acid sequence

SEQ ID NO: 1146 - protein, 109 aa, Artificial Sequence; identical to SEQ ID NO: 346
  Description of Artificial Sequence: Synthetic Light chain variable region amino acid sequence

SEQ ID NO: 1147 - protein, 14 aa, Artificial Sequence
  Description of Artificial Sequence: Synthetic Light chain variable region CDR L1 amino acid sequence
GSSTGAVTTSNYAN

SEQ ID NO: 1148 - DNA, 42 bp, Artificial Sequence; identical to SEQ ID NO: 204
  Description of Artificial Sequence: Synthetic Light chain variable region CDR L1 nucleic acid sequence

SEQ ID NO: 1149 - protein, 7 aa, Artificial Sequence
  Description of Artificial Sequence: Synthetic Light chain variable region CDR L2 amino acid sequence
GTDKRAP

SEQ ID NO: 1150 - DNA, 21 bp, Artificial Sequence
  Description of Artificial Sequence: Synthetic Light chain variable region CDR L2 nucleic acid sequence
ggcacagacaagcgcgctcct

SEQ ID NO: 1151 - protein, 9 aa, Artificial Sequence
  Description of Artificial Sequence: Synthetic Light chain variable region CDR L3 amino acid sequence
ALWYSNHWV

SEQ ID NO: 1152 - DNA, 27 bp, Artificial Sequence
  Description of Artificial Sequence: Synthetic Light chain variable region CDR L3 nucleic acid sequence
gcgctgtggtacagtaaccattgggtg

SEQ ID NO: 1153 - DNA, 375 bp, Artificial Sequence
  Description of Artificial Sequence: Synthetic Heavy chain variable region nucleic acid sequence
gaggtgcagctgttggagtctgggggaggcttggtacagcctggggggtccctgagactctcctgtgcagcctctggattcacctttgacacatatgccatgaactgggtgcgccaggctccagggaaggggctggagtgggtcgcaaggattagatccaagtataacgattacgctacatactacgcagactccgtgaaggatcggttcaccatctccagagacgattccaagagcacgctgtatctgcaaatggaaagcctgagagccgaggacacggcggtgtactactgcgtcaggcacggtaacttcggggaaggttacgtatcctggtttgctcattggggccaaggaaccctggtcaccgtctcctca

SEQ ID NO: 1154 - protein, 125 aa, Artificial Sequence
  Description of Artificial Sequence: Synthetic Heavy chain variable region amino acid sequence
EVQLLESGGGLVQPGGSLRLSCAASGFTFDTYAMNWVRQAPGKGLEWVARIRSKYNDYATYYADSVKDRFTISRDDSKSTLYLQMESLRAEDTAVYYCVRHGNFGEGYVSWFAHWGQGTLVTVSS

SEQ ID NO: 1155 - protein, 9 aa, Artificial Sequence
  Description of Artificial Sequence: Synthetic Heavy chain variable region CDR H1 amino acid sequence
FTFDTYAMN

SEQ ID NO: 1156 - DNA, 27 bp, Artificial Sequence
  Description of Artificial Sequence: Synthetic Heavy chain variable region CDR H1 nucleic acid sequence
ttcacctttgacacatatgccatgaac

SEQ ID NO: 1157 - protein, 19 aa, Artificial Sequence
  Description of Artificial Sequence: Synthetic Heavy chain variable region CDR H2 amino acid sequence
RIRSKYNDYATYYADSVKD

SEQ ID NO: 1158 - DNA, 57 bp, Artificial Sequence; identical to SEQ ID NO: 422
  Description of Artificial Sequence: Synthetic Heavy chain variable region CDR H2 nucleic acid sequence

SEQ ID NO: 1159 - protein, 16 aa, Artificial Sequence
  Description of Artificial Sequence: Synthetic Heavy chain variable region CDR H3 amino acid sequence
VRHGNFGEGYVSWFAH

SEQ ID NO: 1160 - DNA, 48 bp, Artificial Sequence; identical to SEQ ID NO: 472
  Description of Artificial Sequence: Synthetic Heavy chain variable region CDR H3 nucleic acid sequence

SEQ ID NO: 1161 - DNA, 327 bp, Artificial Sequence; identical to SEQ ID NO: 345
  Description of Artificial Sequence: Synthetic Light chain variable region nucleic acid sequence

SEQ ID NO: 1162 - protein, 109 aa, Artificial Sequence; identical to SEQ ID NO: 346
  Description of Artificial Sequence: Synthetic Light chain variable region amino acid sequence

SEQ ID NO: 1163 - protein, 14 aa, Artificial Sequence
  Description of Artificial Sequence: Synthetic Light chain variable region CDR L1 amino acid sequence
GSSTGAVTTSNYAN

SEQ ID NO: 1164 - DNA, 42 bp, Artificial Sequence; identical to SEQ ID NO: 204
  Description of Artificial Sequence: Synthetic Light chain variable region CDR L1 nucleic acid sequence

SEQ ID NO: 1165 - protein, 7 aa, Artificial Sequence
  Description of Artificial Sequence: Synthetic Light chain variable region CDR L2 amino acid sequence
GTDKRAP

SEQ ID NO: 1166 - DNA, 21 bp, Artificial Sequence
  Description of Artificial Sequence: Synthetic Light chain variable region CDR L2 nucleic acid sequence
ggcacagacaagcgcgctcct

SEQ ID NO: 1167 - protein, 9 aa, Artificial Sequence
  Description of Artificial Sequence: Synthetic Light chain variable region CDR L3 amino acid sequence
ALWYSNHWV

SEQ ID NO: 1168 - DNA, 27 bp, Artificial Sequence
  Description of Artificial Sequence: Synthetic Light chain variable region CDR L3 nucleic acid sequence
gcgctgtggtacagtaaccattgggtg

SEQ ID NO: 1169 - DNA, 375 bp, Artificial Sequence
  Description of Artificial Sequence: Synthetic Heavy chain variable region nucleic acid sequence
gaggtgcagctgttggagtctgggggaggcttggtacagcctggggggtccctgagactctcctgtgcagcctctggattcacctttgacacatatgccatgaactgggtgcgccaggctccagggaaggggctggagtgggtcgcaaggattagatccaagtataacgattacgctacatactacgcagactccgtgaaggatcggttcaccatctccagagacgattccaagagcacgctgtatctgcaaatggaaagcctgagagccgaggacacggcggtgtactactgcgtcaggcacgataacttcggggctggttacgtatcctggtttgctcattggggccaaggaaccctggtcaccgtctcctca

SEQ ID NO: 1170 - protein, 125 aa, Artificial Sequence
  Description of Artificial Sequence: Synthetic Heavy chain variable region amino acid sequence
EVQLLESGGGLVQPGGSLRLSCAASGFTFDTYAMNWVRQAPGKGLEWVARIRSKYNDYATYYADSVKDRFTISRDDSKSTLYLQMESLRAEDTAVYYCVRHDNFGAGYVSWFAHWGQGTLVTVSS

SEQ ID NO: 1171 - protein, 9 aa, Artificial Sequence
  Description of Artificial Sequence: Synthetic Heavy chain variable region CDR H1 amino acid sequence
FTFDTYAMN

SEQ ID NO: 1172 - DNA, 27 bp, Artificial Sequence
  Description of Artificial Sequence: Synthetic Heavy chain variable region CDR H1 nucleic acid sequence
ttcacctttgacacatatgccatgaac

SEQ ID NO: 1173 - protein, 19 aa, Artificial Sequence
  Description of Artificial Sequence: Synthetic Heavy chain variable region CDR H2 amino acid sequence
RIRSKYNDYATYYADSVKD

SEQ ID NO: 1174 - DNA, 57 bp, Artificial Sequence; identical to SEQ ID NO: 422
  Description of Artificial Sequence: Synthetic Heavy chain variable region CDR H2 nucleic acid sequence

SEQ ID NO: 1175 - protein, 16 aa, Artificial Sequence
  Description of Artificial Sequence: Synthetic Heavy chain variable region CDR H3 amino acid sequence
VRHDNFGAGYVSWFAH

SEQ ID NO: 1176 - DNA, 48 bp, Artificial Sequence; identical to SEQ ID NO: 1128
  Description of Artificial Sequence: Synthetic Heavy chain variable region CDR H3 nucleic acid sequence

SEQ ID NO: 1177 - DNA, 327 bp, Artificial Sequence; identical to SEQ ID NO: 345
  Description of Artificial Sequence: Synthetic Light chain variable region nucleic acid sequence

SEQ ID NO: 1178 - protein, 109 aa, Artificial Sequence; identical to SEQ ID NO: 346
  Description of Artificial Sequence: Synthetic Light chain variable region amino acid sequence

SEQ ID NO: 1179 - protein, 14 aa, Artificial Sequence
  Description of Artificial Sequence: Synthetic Light chain variable region CDR L1 amino acid sequence
GSSTGAVTTSNYAN

SEQ ID NO: 1180 - DNA, 42 bp, Artificial Sequence; identical to SEQ ID NO: 204
  Description of Artificial Sequence: Synthetic Light chain variable region CDR L1 nucleic acid sequence

SEQ ID NO: 1181 - protein, 7 aa, Artificial Sequence
  Description of Artificial Sequence: Synthetic Light chain variable region CDR L2 amino acid sequence
GTDKRAP

SEQ ID NO: 1182 - DNA, 21 bp, Artificial Sequence
  Description of Artificial Sequence: Synthetic Light chain variable region CDR L2 nucleic acid sequence
ggcacagacaagcgcgctcct

SEQ ID NO: 1183 - protein, 9 aa, Artificial Sequence
  Description of Artificial Sequence: Synthetic Light chain variable region CDR L3 amino acid sequence
ALWYSNHWV

SEQ ID NO: 1184 - DNA, 27 bp, Artificial Sequence
  Description of Artificial Sequence: Synthetic Light chain variable region CDR L3 nucleic acid sequence
gcgctgtggtacagtaaccattgggtg

SEQ ID NO: 1185 - DNA, 375 bp, Artificial Sequence
  Description of Artificial Sequence: Synthetic Heavy chain variable region nucleic acid sequence
gaggtgcagctgttggagtctgggggaggcttggtacagcctggggggtccctgagactctcctgtgcagcctctggattcacctttgacacatatgccatgaactgggtgcgccaggctccagggaaggggctggagtgggtcgcaaggattagatccaagtataacgattacgctacatactacgcagactccgtgaaggatcggttcaccatctccagagacgattccaagagcacgctgtatctgcaaatggaaagcctgagagccgaggacacggcggtgtactactgcgtcaggcacggtaacttcggggttggttacgtatcctggtttgcttcttggggccaaggaaccctggtcaccgtctcctca

SEQ ID NO: 1186 - protein, 125 aa, Artificial Sequence
  Description of Artificial Sequence: Synthetic Heavy chain variable region amino acid sequence
EVQLLESGGGLVQPGGSLRLSCAASGFTFDTYAMNWVRQAPGKGLEWVARIRSKYNDYATYYADSVKDRFTISRDDSKSTLYLQMESLRAEDTAVYYCVRHGNFGVGYVSWFASWGQGTLVTVSS

SEQ ID NO: 1187 - protein, 9 aa, Artificial Sequence
  Description of Artificial Sequence: Synthetic Heavy chain variable region CDR H1 amino acid sequence
FTFDTYAMN

SEQ ID NO: 1188 - DNA, 27 bp, Artificial Sequence
  Description of Artificial Sequence: Synthetic Heavy chain variable region CDR H1 nucleic acid sequence
ttcacctttgacacatatgccatgaac

SEQ ID NO: 1189 - protein, 19 aa, Artificial Sequence
  Description of Artificial Sequence: Synthetic Heavy chain variable region CDR H2 amino acid sequence
RIRSKYNDYATYYADSVKD

SEQ ID NO: 1190 - DNA, 57 bp, Artificial Sequence; identical to SEQ ID NO: 422
  Description of Artificial Sequence: Synthetic Heavy chain variable region CDR H2 nucleic acid sequence

SEQ ID NO: 1191 - protein, 16 aa, Artificial Sequence
  Description of Artificial Sequence: Synthetic Heavy chain variable region CDR H3 amino acid sequence
VRHGNFGVGYVSWFAS

SEQ ID NO: 1192 - DNA, 48 bp, Artificial Sequence; identical to SEQ ID NO: 1144
  Description of Artificial Sequence: Synthetic Heavy chain variable region CDR H3 nucleic acid sequence

SEQ ID NO: 1193 - DNA, 327 bp, Artificial Sequence; identical to SEQ ID NO: 345
  Description of Artificial Sequence: Synthetic Light chain variable region nucleic acid sequence

SEQ ID NO: 1194 - protein, 109 aa, Artificial Sequence; identical to SEQ ID NO: 346
  Description of Artificial Sequence: Synthetic Light chain variable region amino acid sequence

SEQ ID NO: 1195 - protein, 14 aa, Artificial Sequence
  Description of Artificial Sequence: Synthetic Light chain variable region CDR L1 amino acid sequence
GSSTGAVTTSNYAN

SEQ ID NO: 1196 - DNA, 42 bp, Artificial Sequence; identical to SEQ ID NO: 204
  Description of Artificial Sequence: Synthetic Light chain variable region CDR L1 nucleic acid sequence

SEQ ID NO: 1197 - protein, 7 aa, Artificial Sequence
  Description of Artificial Sequence: Synthetic Light chain variable region CDR L2 amino acid sequence
GTDKRAP

SEQ ID NO: 1198 - DNA, 21 bp, Artificial Sequence
  Description of Artificial Sequence: Synthetic Light chain variable region CDR L2 nucleic acid sequence
ggcacagacaagcgcgctcct

SEQ ID NO: 1199 - protein, 9 aa, Artificial Sequence
  Description of Artificial Sequence: Synthetic Light chain variable region CDR L3 amino acid sequence
ALWYSNHWV

SEQ ID NO: 1200 - DNA, 27 bp, Artificial Sequence
  Description of Artificial Sequence: Synthetic Light chain variable region CDR L3 nucleic acid sequence
gcgctgtggtacagtaaccattgggtg

SEQ ID NO: 1201 - DNA, 375 bp, Artificial Sequence
  Description of Artificial Sequence: Synthetic Heavy chain variable region nucleic acid sequence
gaggtgcagctgttggagtctgggggaggcttggtacagcctggggggtccctgagactctcctgtgcagcctctggattcacctttgacacatatgccatgaactgggtgcgccaggctccagggaaggggctggagtgggtcgcaaggattagatccaagtataacgattacgctacatactacgcagactccgtgaaggatcggttcaccatctccagagacgattccaagagcacgctgtatctgcaaatggaaagcctgagagccgaggacacggcggtgtactactgcgtcaggcacggtaacttcgggggtgcttacgtatcctggtttgctcattggggccaaggaaccctggtcaccgtctcctca

SEQ ID NO: 1202 - protein, 125 aa, Artificial Sequence
  Description of Artificial Sequence: Synthetic Heavy chain variable region amino acid sequence
EVQLLESGGGLVQPGGSLRLSCAASGFTFDTYAMNWVRQAPGKGLEWVARIRSKYNDYATYYADSVKDRFTISRDDSKSTLYLQMESLRAEDTAVYYCVRHGNFGGAYVSWFAHWGQGTLVTVSS

SEQ ID NO: 1203 - protein, 9 aa, Artificial Sequence
  Description of Artificial Sequence: Synthetic Heavy chain variable region CDR H1 amino acid sequence
FTFDTYAMN

SEQ ID NO: 1204 - DNA, 27 bp, Artificial Sequence
  Description of Artificial Sequence: Synthetic Heavy chain variable region CDR H1 nucleic acid sequence
ttcacctttgacacatatgccatgaac

SEQ ID NO: 1205 - protein, 19 aa, Artificial Sequence
  Description of Artificial Sequence: Synthetic Heavy chain variable region CDR H2 amino acid sequence
RIRSKYNDYATYYADSVKD

SEQ ID NO: 1206 - DNA, 57 bp, Artificial Sequence; identical to SEQ ID NO: 422
  Description of Artificial Sequence: Synthetic Heavy chain variable region CDR H2 nucleic acid sequence

SEQ ID NO: 1207 - protein, 16 aa, Artificial Sequence
  Description of Artificial Sequence: Synthetic Heavy chain variable region CDR H3 amino acid sequence
VRHGNFGGAYVSWFAH

SEQ ID NO: 1208 - DNA, 48 bp, Artificial Sequence
  Description of Artificial Sequence: Synthetic Heavy chain variable region CDR H3 nucleic acid sequence
gtcaggcacggtaacttcgggggtgcttacgtatcctggtttgctcat

SEQ ID NO: 1209 - DNA, 327 bp, Artificial Sequence; identical to SEQ ID NO: 345
  Description of Artificial Sequence: Synthetic Light chain variable region nucleic acid sequence

SEQ ID NO: 1210 - protein, 109 aa, Artificial Sequence; identical to SEQ ID NO: 346
  Description of Artificial Sequence: Synthetic Light chain variable region amino acid sequence

SEQ ID NO: 1211 - protein, 14 aa, Artificial Sequence
  Description of Artificial Sequence: Synthetic Light chain variable region CDR L1 amino acid sequence
GSSTGAVTTSNYAN

SEQ ID NO: 1212 - DNA, 42 bp, Artificial Sequence; identical to SEQ ID NO: 204
  Description of Artificial Sequence: Synthetic Light chain variable region CDR L1 nucleic acid sequence

SEQ ID NO: 1213 - protein, 7 aa, Artificial Sequence
  Description of Artificial Sequence: Synthetic Light chain variable region CDR L2 amino acid sequence
GTDKRAP

SEQ ID NO: 1214 - DNA, 21 bp, Artificial Sequence
  Description of Artificial Sequence: Synthetic Light chain variable region CDR L2 nucleic acid sequence
ggcacagacaagcgcgctcct

SEQ ID NO: 1215 - protein, 9 aa, Artificial Sequence
  Description of Artificial Sequence: Synthetic Light chain variable region CDR L3 amino acid sequence
ALWYSNHWV

SEQ ID NO: 1216 - DNA, 27 bp, Artificial Sequence
  Description of Artificial Sequence: Synthetic Light chain variable region CDR L3 nucleic acid sequence
gcgctgtggtacagtaaccattgggtg

SEQ ID NO: 1217 - DNA, 375 bp, Artificial Sequence
  Description of Artificial Sequence: Synthetic Heavy chain variable region nucleic acid sequence
gaggtgcagctgttggagtctgggggaggcttggtacagcctggggggtccctgagactctcctgtgcagcctctggattcacctttgacgcttatgccatgaactgggtgcgccaggctccagggaaggggctggagtgggtcgcaaggattagatccaagtataacgattacgctacatactacgcagactccgtgaaggatcggttcaccatctccagagacgattccaagagcacgctgtatctgcaaatggaaagcctgagagccgaggacacggcggtgtactactgcgtcaggcacggtaacttcggggggggttacgtatcctggtttgggcattggggccaaggaaccctggtcaccgtctcctca

SEQ ID NO: 1218 - protein, 125 aa, Artificial Sequence
  Description of Artificial Sequence: Synthetic Heavy chain variable region amino acid sequence
EVQLLESGGGLVQPGGSLRLSCAASGFTFDAYAMNWVRQAPGKGLEWVARIRSKYNDYATYYADSVKDRFTISRDDSKSTLYLQMESLRAEDTAVYYCVRHGNFGGGYVSWFGHWGQGTLVTVSS

SEQ ID NO: 1219 - protein, 9 aa, Artificial Sequence
  Description of Artificial Sequence: Synthetic Heavy chain variable region CDR H1 amino acid sequence
FTFDAYAMN

SEQ ID NO: 1220 - DNA, 27 bp, Artificial Sequence
  Description of Artificial Sequence: Synthetic Heavy chain variable region CDR H1 nucleic acid sequence
ttcacctttgacgcttatgccatgaac

SEQ ID NO: 1221 - protein, 19 aa, Artificial Sequence
  Description of Artificial Sequence: Synthetic Heavy chain variable region CDR H2 amino acid sequence
RIRSKYNDYATYYADSVKD

SEQ ID NO: 1222 - DNA, 57 bp, Artificial Sequence; identical to SEQ ID NO: 422
  Description of Artificial Sequence: Synthetic Heavy chain variable region CDR H2 nucleic acid sequence

SEQ ID NO: 1223 - protein, 16 aa, Artificial Sequence
  Description of Artificial Sequence: Synthetic Heavy chain variable region CDR H3 amino acid sequence
VRHGNFGGGYVSWFGH

SEQ ID NO: 1224 - DNA, 48 bp, Artificial Sequence
  Description of Artificial Sequence: Synthetic Heavy chain variable region CDR H3 nucleic acid sequence
gtcaggcacggtaacttcggggggggttacgtatcctggtttgggcat

SEQ ID NO: 1225 - DNA, 327 bp, Artificial Sequence; identical to SEQ ID NO: 345
  Description of Artificial Sequence: Synthetic Light chain variable region nucleic acid sequence

SEQ ID NO: 1226 - protein, 109 aa, Artificial Sequence; identical to SEQ ID NO: 346
  Description of Artificial Sequence: Synthetic Light chain variable region amino acid sequence

SEQ ID NO: 1227 - protein, 14 aa, Artificial Sequence
  Description of Artificial Sequence: Synthetic Light chain variable region CDR L1 amino acid sequence
GSSTGAVTTSNYAN

SEQ ID NO: 1228 - DNA, 42 bp, Artificial Sequence; identical to SEQ ID NO: 204
  Description of Artificial Sequence: Synthetic Light chain variable region CDR L1 nucleic acid sequence

SEQ ID NO: 1229 - protein, 7 aa, Artificial Sequence
  Description of Artificial Sequence: Synthetic Light chain variable region CDR L2 amino acid sequence
GTDKRAP

SEQ ID NO: 1230 - DNA, 21 bp, Artificial Sequence
  Description of Artificial Sequence: Synthetic Light chain variable region CDR L2 nucleic acid sequence
ggcacagacaagcgcgctcct

SEQ ID NO: 1231 - protein, 9 aa, Artificial Sequence
  Description of Artificial Sequence: Synthetic Light chain variable region CDR L3 amino acid sequence
ALWYSNHWV

SEQ ID NO: 1232 - DNA, 27 bp, Artificial Sequence
  Description of Artificial Sequence: Synthetic Light chain variable region CDR L3 nucleic acid sequence
gcgctgtggtacagtaaccattgggtg

SEQ ID NO: 1233 - DNA, 375 bp, Artificial Sequence
  Description of Artificial Sequence: Synthetic Heavy chain variable region nucleic acid sequence
gaggtgcagctgttggagtctgggggaggcttggtacagcctggggggtccctgagactctcctgtgcagcctctggattcacctttgacgcttatgccatgaactgggtgcgccaggctccagggaaggggctggagtgggtcgcaaggattagatccaagtataacgattacgctacatactacgcagactccgtgaaggatcggttcaccatctccagagacgattccaagagcacgctgtatctgcaaatggaaagcctgagagccgaggacacggcggtgtactactgcgtcaggcacggtaacttcgggaactatgctgtatcctggtttgctcattggggccaaggaaccctggtcaccgtctcctca

SEQ ID NO: 1234 - protein, 125 aa, Artificial Sequence
  Description of Artificial Sequence: Synthetic Heavy chain variable region amino acid sequence
EVQLLESGGGLVQPGGSLRLSCAASGFTFDAYAMNWVRQAPGKGLEWVARIRSKYNDYATYYADSVKDRFTISRDDSKSTLYLQMESLRAEDTAVYYCVRHGNFGNYAVSWFAHWGQGTLVTVSS

SEQ ID NO: 1235 - protein, 9 aa, Artificial Sequence
  Description of Artificial Sequence: Synthetic Heavy chain variable region CDR H1 amino acid sequence
FTFDAYAMN

SEQ ID NO: 1236 - DNA, 27 bp, Artificial Sequence
  Description of Artificial Sequence: Synthetic Heavy chain variable region CDR H1 nucleic acid sequence
ttcacctttgacgcttatgccatgaac

SEQ ID NO: 1237 - protein, 19 aa, Artificial Sequence
  Description of Artificial Sequence: Synthetic Heavy chain variable region CDR H2 amino acid sequence
RIRSKYNDYATYYADSVKD

SEQ ID NO: 1238 - DNA, 57 bp, Artificial Sequence; identical to SEQ ID NO: 422
  Description of Artificial Sequence: Synthetic Heavy chain variable region CDR H2 nucleic acid sequence

SEQ ID NO: 1239 - protein, 16 aa, Artificial Sequence
  Description of Artificial Sequence: Synthetic Heavy chain variable region CDR H3 amino acid sequence
VRHGNFGNYAVSWFAH

SEQ ID NO: 1240 - DNA, 48 bp, Artificial Sequence
  Description of Artificial Sequence: Synthetic Heavy chain variable region CDR H3 nucleic acid sequence
gtcaggcacggtaacttcgggaactatgctgtatcctggtttgctcat

SEQ ID NO: 1241 - DNA, 327 bp, Artificial Sequence; identical to SEQ ID NO: 345
  Description of Artificial Sequence: Synthetic Light chain variable region nucleic acid sequence

SEQ ID NO: 1242 - protein, 109 aa, Artificial Sequence; identical to SEQ ID NO: 346
  Description of Artificial Sequence: Synthetic Light chain variable region amino acid sequence

SEQ ID NO: 1243 - protein, 14 aa, Artificial Sequence
  Description of Artificial Sequence: Synthetic Light chain variable region CDR L1 amino acid sequence
GSSTGAVTTSNYAN

SEQ ID NO: 1244 - DNA, 42 bp, Artificial Sequence; identical to SEQ ID NO: 204
  Description of Artificial Sequence: Synthetic Light chain variable region CDR L1 nucleic acid sequence

SEQ ID NO: 1245 - protein, 7 aa, Artificial Sequence
  Description of Artificial Sequence: Synthetic Light chain variable region CDR L2 amino acid sequence
GTDKRAP

SEQ ID NO: 1246 - DNA, 21 bp, Artificial Sequence
  Description of Artificial Sequence: Synthetic Light chain variable region CDR L2 nucleic acid sequence
ggcacagacaagcgcgctcct

SEQ ID NO: 1247 - protein, 9 aa, Artificial Sequence
  Description of Artificial Sequence: Synthetic Light chain variable region CDR L3 amino acid sequence
ALWYSNHWV

SEQ ID NO: 1248 - DNA, 27 bp, Artificial Sequence
  Description of Artificial Sequence: Synthetic Light chain variable region CDR L3 nucleic acid sequence
gcgctgtggtacagtaaccattgggtg

SEQ ID NO: 1249 - DNA, 375 bp, Artificial Sequence; identical to SEQ ID NO: 1057
  Description of Artificial Sequence: Synthetic Heavy chain variable region nucleic acid sequence

SEQ ID NO: 1250 - protein, 125 aa, Artificial Sequence; identical to SEQ ID NO: 1058
  Description of Artificial Sequence: Synthetic Heavy chain variable region amino acid sequence

SEQ ID NO: 1251 - protein, 9 aa, Artificial Sequence
  Description of Artificial Sequence: Synthetic Heavy chain variable region CDR H1 amino acid sequence
FTFDTYAMN

SEQ ID NO: 1252 - DNA, 27 bp, Artificial Sequence
  Description of Artificial Sequence: Synthetic Heavy chain variable region CDR H1 nucleic acid sequence
ttcacctttgacacatatgccatgaac

SEQ ID NO: 1253 - protein, 19 aa, Artificial Sequence
  Description of Artificial Sequence: Synthetic Heavy chain variable region CDR H2 amino acid sequence
RIRSKYNNYATYYADSVKD

SEQ ID NO: 1254 - DNA, 57 bp, Artificial Sequence; identical to SEQ ID NO: 6
  Description of Artificial Sequence: Synthetic Heavy chain variable region CDR H2 nucleic acid sequence

SEQ ID NO: 1255 - protein, 16 aa, Artificial Sequence
  Description of Artificial Sequence: Synthetic Heavy chain variable region CDR H3 amino acid sequence
VRHGNFQGGYVSWFAH

SEQ ID NO: 1256 - DNA, 48 bp, Artificial Sequence; identical to SEQ ID NO: 1064
  Description of Artificial Sequence: Synthetic Heavy chain variable region CDR H3 nucleic acid sequence

SEQ ID NO: 1257 - DNA, 327 bp, Artificial Sequence
  Description of Artificial Sequence: Synthetic Light chain variable region nucleic acid sequence
cagactgtggtgacccaggagccatcgctctcagtgtcccctggagggacagtcacactcacttgtggatcaagcactggcgcagtcactactagtaactacgccaactgggtccagcagaccccaggccaggctccgcgcggactcatcggcggcacagacaagcgcgctcctggggtccctgatcgcttctctggctccctgcttggggacaaagctgccctcaccatcacgggggcccaggcagaggatgaagctgattattactgtgcgctgtggtacagtaacctttgggtgttcggcggagggaccaagctgaccgtccta

SEQ ID NO: 1258 - protein, 109 aa, Artificial Sequence
  Description of Artificial Sequence: Synthetic Light chain variable region amino acid sequence
QTVVTQEPSLSVSPGGTVTLTCGSSTGAVTTSNYANWVQQTPGQAPRGLIGGTDKRAPGVPDRFSGSLLGDKAALTITGAQAEDEADYYCALWYSNLWVFGGGTKLTVL

SEQ ID NO: 1259 - protein, 14 aa, Artificial Sequence
  Description of Artificial Sequence: Synthetic Light chain variable region CDR L1 amino acid sequence
GSSTGAVTTSNYAN

SEQ ID NO: 1260 - DNA, 42 bp, Artificial Sequence; identical to SEQ ID NO: 204
  Description of Artificial Sequence: Synthetic Light chain variable region CDR L1 nucleic acid sequence

SEQ ID NO: 1261 - protein, 7 aa, Artificial Sequence
  Description of Artificial Sequence: Synthetic Light chain variable region CDR L2 amino acid sequence
GTDKRAP

SEQ ID NO: 1262 - DNA, 21 bp, Artificial Sequence
  Description of Artificial Sequence: Synthetic Light chain variable region CDR L2 nucleic acid sequence
ggcacagacaagcgcgctcct

SEQ ID NO: 1263 - protein, 9 aa, Artificial Sequence
  Description of Artificial Sequence: Synthetic Light chain variable region CDR L3 amino acid sequence
ALWYSNLWV

SEQ ID NO: 1264 - DNA, 27 bp, Artificial Sequence
  Description of Artificial Sequence: Synthetic Light chain variable region CDR L3 nucleic acid sequence
gcgctgtggtacagtaacctttgggtg

SEQ ID NO: 1265 - DNA, 375 bp, Artificial Sequence; identical to SEQ ID NO: 1089
  Description of Artificial Sequence: Synthetic Heavy chain variable region nucleic acid sequence

SEQ ID NO: 1266 - protein, 125 aa, Artificial Sequence; identical to SEQ ID NO: 1090
  Description of Artificial Sequence: Synthetic Heavy chain variable region amino acid sequence

SEQ ID NO: 1267 - protein, 9 aa, Artificial Sequence
  Description of Artificial Sequence: Synthetic Heavy chain variable region CDR H1 amino acid sequence
FTFDTYAMN

SEQ ID NO: 1268 - DNA, 27 bp, Artificial Sequence
  Description of Artificial Sequence: Synthetic Heavy chain variable region CDR H1 nucleic acid sequence
ttcacctttgacacatatgccatgaac

SEQ ID NO: 1269 - protein, 19 aa, Artificial Sequence
  Description of Artificial Sequence: Synthetic Heavy chain variable region CDR H2 amino acid sequence
RIRSKYNNYATYYADSVKD

SEQ ID NO: 1270 - DNA, 57 bp, Artificial Sequence; identical to SEQ ID NO: 6
  Description of Artificial Sequence: Synthetic Heavy chain variable region CDR H2 nucleic acid sequence

SEQ ID NO: 1271 - protein, 16 aa, Artificial Sequence
  Description of Artificial Sequence: Synthetic Heavy chain variable region CDR H3 amino acid sequence
VRHANFGAGYVSWFAH

SEQ ID NO: 1272 - DNA, 48 bp, Artificial Sequence; identical to SEQ ID NO: 1096
  Description of Artificial Sequence: Synthetic Heavy chain variable region CDR H3 nucleic acid sequence

SEQ ID NO: 1273 - DNA, 327 bp, Artificial Sequence; identical to SEQ ID NO: 1257
  Description of Artificial Sequence: Synthetic Light chain variable region nucleic acid sequence

SEQ ID NO: 1274 - protein, 109 aa, Artificial Sequence; identical to SEQ ID NO: 1258
  Description of Artificial Sequence: Synthetic Light chain variable region amino acid sequence

SEQ ID NO: 1275 - protein, 14 aa, Artificial Sequence
  Description of Artificial Sequence: Synthetic Light chain variable region CDR L1 amino acid sequence
GSSTGAVTTSNYAN

SEQ ID NO: 1276 - DNA, 42 bp, Artificial Sequence; identical to SEQ ID NO: 204
  Description of Artificial Sequence: Synthetic Light chain variable region CDR L1 nucleic acid sequence

SEQ ID NO: 1277 - protein, 7 aa, Artificial Sequence
  Description of Artificial Sequence: Synthetic Light chain variable region CDR L2 amino acid sequence
GTDKRAP

SEQ ID NO: 1278 - DNA, 21 bp, Artificial Sequence
  Description of Artificial Sequence: Synthetic Light chain variable region CDR L2 nucleic acid sequence
ggcacagacaagcgcgctcct

SEQ ID NO: 1279 - protein, 9 aa, Artificial Sequence
  Description of Artificial Sequence: Synthetic Light chain variable region CDR L3 amino acid sequence
ALWYSNLWV

SEQ ID NO: 1280 - DNA, 27 bp, Artificial Sequence
  Description of Artificial Sequence: Synthetic Light chain variable region CDR L3 nucleic acid sequence
gcgctgtggtacagtaacctttgggtg

SEQ ID NO: 1281 - DNA, 375 bp, Artificial Sequence; identical to SEQ ID NO: 1105
  Description of Artificial Sequence: Synthetic Heavy chain variable region nucleic acid sequence

SEQ ID NO: 1282 - protein, 125 aa, Artificial Sequence; identical to SEQ ID NO: 482
  Description of Artificial Sequence: Synthetic Heavy chain variable region amino acid sequence

SEQ ID NO: 1283 - protein, 9 aa, Artificial Sequence
  Description of Artificial Sequence: Synthetic Heavy chain variable region CDR H1 amino acid sequence
FTFDTYAMN

SEQ ID NO: 1284 - DNA, 27 bp, Artificial Sequence
  Description of Artificial Sequence: Synthetic Heavy chain variable region CDR H1 nucleic acid sequence
ttcacctttgacacatatgccatgaac

SEQ ID NO: 1285 - protein, 19 aa, Artificial Sequence
  Description of Artificial Sequence: Synthetic Heavy chain variable region CDR H2 amino acid sequence
RIRSKYNNYATYYADSVKD

SEQ ID NO: 1286 - DNA, 57 bp, Artificial Sequence; identical to SEQ ID NO: 6
  Description of Artificial Sequence: Synthetic Heavy chain variable region CDR H2 nucleic acid sequence

SEQ ID NO: 1287 - protein, 16 aa, Artificial Sequence
  Description of Artificial Sequence: Synthetic Heavy chain variable region CDR H3 amino acid sequence
VRHGNFGEGYVSWFAH

SEQ ID NO: 1288 - DNA, 48 bp, Artificial Sequence; identical to SEQ ID NO: 472
  Description of Artificial Sequence: Synthetic Heavy chain variable region CDR H3 nucleic acid sequence

SEQ ID NO: 1289 - DNA, 327 bp, Artificial Sequence; identical to SEQ ID NO: 1257
  Description of Artificial Sequence: Synthetic Light chain variable region nucleic acid sequence

SEQ ID NO: 1290 - protein, 109 aa, Artificial Sequence; identical to SEQ ID NO: 1258
  Description of Artificial Sequence: Synthetic Light chain variable region amino acid sequence

SEQ ID NO: 1291 - protein, 14 aa, Artificial Sequence
  Description of Artificial Sequence: Synthetic Light chain variable region CDR L1 amino acid sequence
GSSTGAVTTSNYAN

SEQ ID NO: 1292 - DNA, 42 bp, Artificial Sequence; identical to SEQ ID NO: 204
  Description of Artificial Sequence: Synthetic Light chain variable region CDR L1 nucleic acid sequence

SEQ ID NO: 1293 - protein, 7 aa, Artificial Sequence
  Description of Artificial Sequence: Synthetic Light chain variable region CDR L2 amino acid sequence
GTDKRAP

SEQ ID NO: 1294 - DNA, 21 bp, Artificial Sequence
  Description of Artificial Sequence: Synthetic Light chain variable region CDR L2 nucleic acid sequence
ggcacagacaagcgcgctcct

SEQ ID NO: 1295 - protein, 9 aa, Artificial Sequence
  Description of Artificial Sequence: Synthetic Light chain variable region CDR L3 amino acid sequence
ALWYSNLWV

SEQ ID NO: 1296 - DNA, 27 bp, Artificial Sequence
  Description of Artificial Sequence: Synthetic Light chain variable region CDR L3 nucleic acid sequence
gcgctgtggtacagtaacctttgggtg

SEQ ID NO: 1297 - DNA, 375 bp, Artificial Sequence; identical to SEQ ID NO: 1121
  Description of Artificial Sequence: Synthetic Heavy chain variable region nucleic acid sequence

SEQ ID NO: 1298 - protein, 125 aa, Artificial Sequence; identical to SEQ ID NO: 1122
  Description of Artificial Sequence: Synthetic Heavy chain variable region amino acid sequence

SEQ ID NO: 1299 - protein, 9 aa, Artificial Sequence
  Description of Artificial Sequence: Synthetic Heavy chain variable region CDR H1 amino acid sequence
FTFDTYAMN

SEQ ID NO: 1300 - DNA, 27 bp, Artificial Sequence
  Description of Artificial Sequence: Synthetic Heavy chain variable region CDR H1 nucleic acid sequence
ttcacctttgacacatatgccatgaac

SEQ ID NO: 1301 - protein, 19 aa, Artificial Sequence
  Description of Artificial Sequence: Synthetic Heavy chain variable region CDR H2 amino acid sequence
RIRSKYNNYATYYADSVKD

SEQ ID NO: 1302 - DNA, 57 bp, Artificial Sequence; identical to SEQ ID NO: 6
  Description of Artificial Sequence: Synthetic Heavy chain variable region CDR H2 nucleic acid sequence

SEQ ID NO: 1303 - protein, 16 aa, Artificial Sequence
  Description of Artificial Sequence: Synthetic Heavy chain variable region CDR H3 amino acid sequence
VRHDNFGAGYVSWFAH

SEQ ID NO: 1304 - DNA, 48 bp, Artificial Sequence; identical to SEQ ID NO: 1128
  Description of Artificial Sequence: Synthetic Heavy chain variable region CDR H3 nucleic acid sequence

SEQ ID NO: 1305 - DNA, 327 bp, Artificial Sequence; identical to SEQ ID NO: 1257
  Description of Artificial Sequence: Synthetic Light chain variable region nucleic acid sequence

SEQ ID NO: 1306 - protein, 109 aa, Artificial Sequence; identical to SEQ ID NO: 1258
  Description of Artificial Sequence: Synthetic Light chain variable region amino acid sequence

SEQ ID NO: 1307 - protein, 14 aa, Artificial Sequence
  Description of Artificial Sequence: Synthetic Light chain variable region CDR L1 amino acid sequence
GSSTGAVTTSNYAN

SEQ ID NO: 1308 - DNA, 42 bp, Artificial Sequence; identical to SEQ ID NO: 204
  Description of Artificial Sequence: Synthetic Light chain variable region CDR L1 nucleic acid sequence

SEQ ID NO: 1309 - protein, 7 aa, Artificial Sequence
  Description of Artificial Sequence: Synthetic Light chain variable region CDR L2 amino acid sequence
GTDKRAP

SEQ ID NO: 1310 - DNA, 21 bp, Artificial Sequence
  Description of Artificial Sequence: Synthetic Light chain variable region CDR L2 nucleic acid sequence
ggcacagacaagcgcgctcct

SEQ ID NO: 1311 - protein, 9 aa, Artificial Sequence
  Description of Artificial Sequence: Synthetic Light chain variable region CDR L3 amino acid sequence
ALWYSNLWV

SEQ ID NO: 1312 - DNA, 27 bp, Artificial Sequence
  Description of Artificial Sequence: Synthetic Light chain variable region CDR L3 nucleic acid sequence
gcgctgtggtacagtaacctttgggtg

SEQ ID NO: 1313 - DNA, 375 bp, Artificial Sequence
  Description of Artificial Sequence: Synthetic Heavy chain variable region nucleic acid sequence
gaggtgcagctgttggagtctgggggaggcttggtacagcctggggggtccctgagactctcctgtgcagcctctggattcacctttgacacatatgccatgaactgggtgcgccaggctccagggaaggggctggagtgggtcgcaaggattagatccaagtataacaattacgctacatactacgcagactccgtgaaggatcggttcaccatctccagagacgattccaagagcacgctgtatctgcaaatggaaagcctgagagccgaggacacggcggtgtactactgcgtcaggcacggtaacttcgggggtgcttacgtatcctggtttgctcattggggccaaggaaccctggtcaccgtctcctca

SEQ ID NO: 1314 - protein, 125 aa, Artificial Sequence
  Description of Artificial Sequence: Synthetic Heavy chain variable region amino acid sequence
EVQLLESGGGLVQPGGSLRLSCAASGFTFDTYAMNWVRQAPGKGLEWVARIRSKYNNYATYYADSVKDRFTISRDDSKSTLYLQMESLRAEDTAVYYCVRHGNFGGAYVSWFAHWGQGTLVTVSS

SEQ ID NO: 1315 - protein, 9 aa, Artificial Sequence
  Description of Artificial Sequence: Synthetic Heavy chain variable region CDR H1 amino acid sequence
FTFDTYAMN

SEQ ID NO: 1316 - DNA, 27 bp, Artificial Sequence
  Description of Artificial Sequence: Synthetic Heavy chain variable region CDR H1 nucleic acid sequence
ttcacctttgacacatatgccatgaac

SEQ ID NO: 1317 - protein, 19 aa, Artificial Sequence
  Description of Artificial Sequence: Synthetic Heavy chain variable region CDR H2 amino acid sequence
RIRSKYNNYATYYADSVKD

SEQ ID NO: 1318 - DNA, 57 bp, Artificial Sequence; identical to SEQ ID NO: 6
  Description of Artificial Sequence: Synthetic Heavy chain variable region CDR H2 nucleic acid sequence

SEQ ID NO: 1319 - protein, 16 aa, Artificial Sequence
  Description of Artificial Sequence: Synthetic Heavy chain variable region CDR H3 amino acid sequence
VRHGNFGGAYVSWFAH

SEQ ID NO: 1320 - DNA, 48 bp, Artificial Sequence; identical to SEQ ID NO: 1208
  Description of Artificial Sequence: Synthetic Heavy chain variable region CDR H3 nucleic acid sequence

SEQ ID NO: 1321 - DNA, 327 bp, Artificial Sequence; identical to SEQ ID NO: 1257
  Description of Artificial Sequence: Synthetic Light chain variable region nucleic acid sequence

SEQ ID NO: 1322 - protein, 109 aa, Artificial Sequence; identical to SEQ ID NO: 1258
  Description of Artificial Sequence: Synthetic Light chain variable region amino acid sequence

SEQ ID NO: 1323 - protein, 14 aa, Artificial Sequence
  Description of Artificial Sequence: Synthetic Light chain variable region CDR L1 amino acid sequence
GSSTGAVTTSNYAN

SEQ ID NO: 1324 - DNA, 42 bp, Artificial Sequence; identical to SEQ ID NO: 204
  Description of Artificial Sequence: Synthetic Light chain variable region CDR L1 nucleic acid sequence

SEQ ID NO: 1325 - protein, 7 aa, Artificial Sequence
  Description of Artificial Sequence: Synthetic Light chain variable region CDR L2 amino acid sequence
GTDKRAP

SEQ ID NO: 1326 - DNA, 21 bp, Artificial Sequence
  Description of Artificial Sequence: Synthetic Light chain variable region CDR L2 nucleic acid sequence
ggcacagacaagcgcgctcct

SEQ ID NO: 1327 - protein, 9 aa, Artificial Sequence
  Description of Artificial Sequence: Synthetic Light chain variable region CDR L3 amino acid sequence
ALWYSNLWV

SEQ ID NO: 1328 - DNA, 27 bp, Artificial Sequence
  Description of Artificial Sequence: Synthetic Light chain variable region CDR L3 nucleic acid sequence
gcgctgtggtacagtaacctttgggtg

SEQ ID NO: 1329 - DNA, 375 bp, Artificial Sequence; identical to SEQ ID NO: 1153
  Description of Artificial Sequence: Synthetic Heavy chain variable region nucleic acid sequence

SEQ ID NO: 1330 - protein, 125 aa, Artificial Sequence; identical to SEQ ID NO: 1154
  Description of Artificial Sequence: Synthetic Heavy chain variable region amino acid sequence

SEQ ID NO: 1331 - protein, 9 aa, Artificial Sequence
  Description of Artificial Sequence: Synthetic Heavy chain variable region CDR H1 amino acid sequence
FTFDTYAMN

SEQ ID NO: 1332 - DNA, 27 bp, Artificial Sequence
  Description of Artificial Sequence: Synthetic Heavy chain variable region CDR H1 nucleic acid sequence
ttcacctttgacacatatgccatgaac

SEQ ID NO: 1333 - protein, 19 aa, Artificial Sequence
  Description of Artificial Sequence: Synthetic Heavy chain variable region CDR H2 amino acid sequence
RIRSKYNDYATYYADSVKD

SEQ ID NO: 1334 - DNA, 57 bp, Artificial Sequence; identical to SEQ ID NO: 422
  Description of Artificial Sequence: Synthetic Heavy chain variable region CDR H2 nucleic acid sequence

SEQ ID NO: 1335 - protein, 16 aa, Artificial Sequence
  Description of Artificial Sequence: Synthetic Heavy chain variable region CDR H3 amino acid sequence
VRHGNFGEGYVSWFAH

SEQ ID NO: 1336 - DNA, 48 bp, Artificial Sequence; identical to SEQ ID NO: 472
  Description of Artificial Sequence: Synthetic Heavy chain variable region CDR H3 nucleic acid sequence

SEQ ID NO: 1337 - DNA, 327 bp, Artificial Sequence; identical to SEQ ID NO: 1257
  Description of Artificial Sequence: Synthetic Light chain variable region nucleic acid sequence

SEQ ID NO: 1338 - protein, 109 aa, Artificial Sequence; identical to SEQ ID NO: 1258
  Description of Artificial Sequence: Synthetic Light chain variable region amino acid sequence

SEQ ID NO: 1339 - protein, 14 aa, Artificial Sequence
  Description of Artificial Sequence: Synthetic Light chain variable region CDR L1 amino acid sequence
GSSTGAVTTSNYAN

SEQ ID NO: 1340 - DNA, 42 bp, Artificial Sequence; identical to SEQ ID NO: 204
  Description of Artificial Sequence: Synthetic Light chain variable region CDR L1 nucleic acid sequence

SEQ ID NO: 1341 - protein, 7 aa, Artificial Sequence
  Description of Artificial Sequence: Synthetic Light chain variable region CDR L2 amino acid sequence
GTDKRAP

SEQ ID NO: 1342 - DNA, 21 bp, Artificial Sequence
  Description of Artificial Sequence: Synthetic Light chain variable region CDR L2 nucleic acid sequence
ggcacagacaagcgcgctcct

SEQ ID NO: 1343 - protein, 9 aa, Artificial Sequence
  Description of Artificial Sequence: Synthetic Light chain variable region CDR L3 amino acid sequence
ALWYSNLWV

SEQ ID NO: 1344 - DNA, 27 bp, Artificial Sequence
  Description of Artificial Sequence: Synthetic Light chain variable region CDR L3 nucleic acid sequence
gcgctgtggtacagtaacctttgggtg

SEQ ID NO: 1345 - DNA, 375 bp, Artificial Sequence
  Description of Artificial Sequence: Synthetic Heavy chain variable region nucleic acid sequence
gaggtgcagctgttggagtctgggggaggcttggtacagcctggggggtccctgagactctcctgtgcagcctctggattcacctttgacacatatgccatgaactgggtgcgccaggctccagggaaggggctggagtgggtcgcaaggattagatccaagtataacgattacgctacatactacgcagactccgtgaaggatcggttcaccatctccagagacgattccaagagcacgctgtatctgcaaatggaaagcctgagagccgaggacacggcggtgtactactgcgtcaggcacgataacttcggggctggttacgtatcatggtttgctcattggggccaaggaaccctggtcaccgtatcctca

SEQ ID NO: 1346 - protein, 125 aa, Artificial Sequence; identical to SEQ ID NO: 1170
  Description of Artificial Sequence: Synthetic Heavy chain variable region amino acid sequence

SEQ ID NO: 1347 - protein, 9 aa, Artificial Sequence
  Description of Artificial Sequence: Synthetic Heavy chain variable region CDR H1 amino acid sequence
FTFDTYAMN

SEQ ID NO: 1348 - DNA, 27 bp, Artificial Sequence
  Description of Artificial Sequence: Synthetic Heavy chain variable region CDR H1 nucleic acid sequence
ttcacctttgacacatatgccatgaac

SEQ ID NO: 1349 - protein, 19 aa, Artificial Sequence
  Description of Artificial Sequence: Synthetic Heavy chain variable region CDR H2 amino acid sequence
RIRSKYNDYATYYADSVKD

SEQ ID NO: 1350 - DNA, 57 bp, Artificial Sequence; identical to SEQ ID NO: 422
  Description of Artificial Sequence: Synthetic Heavy chain variable region CDR H2 nucleic acid sequence

SEQ ID NO: 1351 - protein, 16 aa, Artificial Sequence
  Description of Artificial Sequence: Synthetic Heavy chain variable region CDR H3 amino acid sequence
VRHDNFGAGYVSWFAH

SEQ ID NO: 1352 - DNA, 48 bp, Artificial Sequence
  Description of Artificial Sequence: Synthetic Heavy chain variable region CDR H3 nucleic acid sequence
gtcaggcacgataacttcggggctggttacgtatcatggtttgctcat

SEQ ID NO: 1353 - DNA, 327 bp, Artificial Sequence; identical to SEQ ID NO: 1257
  Description of Artificial Sequence: Synthetic Light chain variable region nucleic acid sequence

SEQ ID NO: 1354 - protein, 109 aa, Artificial Sequence; identical to SEQ ID NO: 1258
  Description of Artificial Sequence: Synthetic Light chain variable region amino acid sequence

SEQ ID NO: 1355 - protein, 14 aa, Artificial Sequence
  Description of Artificial Sequence: Synthetic Light chain variable region CDR L1 amino acid sequence
GSSTGAVTTSNYAN

SEQ ID NO: 1356 - DNA, 42 bp, Artificial Sequence; identical to SEQ ID NO: 204
  Description of Artificial Sequence: Synthetic Light chain variable region CDR L1 nucleic acid sequence

SEQ ID NO: 1357 - protein, 7 aa, Artificial Sequence
  Description of Artificial Sequence: Synthetic Light chain variable region CDR L2 amino acid sequence
GTDKRAP

SEQ ID NO: 1358 - DNA, 21 bp, Artificial Sequence
  Description of Artificial Sequence: Synthetic Light chain variable region CDR L2 nucleic acid sequence
ggcacagacaagcgcgctcct

SEQ ID NO: 1359 - protein, 9 aa, Artificial Sequence
  Description of Artificial Sequence: Synthetic Light chain variable region CDR L3 amino acid sequence
ALWYSNLWV

SEQ ID NO: 1360 - DNA, 27 bp, Artificial Sequence
  Description of Artificial Sequence: Synthetic Light chain variable region CDR L3 nucleic acid sequence
gcgctgtggtacagtaacctttgggtg

SEQ ID NO: 1361 - DNA, 375 bp, Artificial Sequence; identical to SEQ ID NO: 1185
  Description of Artificial Sequence: Synthetic Heavy chain variable region nucleic acid sequence

SEQ ID NO: 1362 - protein, 125 aa, Artificial Sequence; identical to SEQ ID NO: 1186
  Description of Artificial Sequence: Synthetic Heavy chain variable region amino acid sequence

SEQ ID NO: 1363 - protein, 9 aa, Artificial Sequence
  Description of Artificial Sequence: Synthetic Heavy chain variable region CDR H1 amino acid sequence
FTFDTYAMN

SEQ ID NO: 1364 - DNA, 27 bp, Artificial Sequence
  Description of Artificial Sequence: Synthetic Heavy chain variable region CDR H1 nucleic acid sequence
ttcacctttgacacatatgccatgaac

SEQ ID NO: 1365 - protein, 19 aa, Artificial Sequence
  Description of Artificial Sequence: Synthetic Heavy chain variable region CDR H2 amino acid sequence
RIRSKYNDYATYYADSVKD

SEQ ID NO: 1366 - DNA, 57 bp, Artificial Sequence; identical to SEQ ID NO: 422
  Description of Artificial Sequence: Synthetic Heavy chain variable region CDR H2 nucleic acid sequence

SEQ ID NO: 1367 - protein, 16 aa, Artificial Sequence
  Description of Artificial Sequence: Synthetic Heavy chain variable region CDR H3 amino acid sequence
VRHGNFGVGYVSWFAS

SEQ ID NO: 1368 - DNA, 48 bp, Artificial Sequence; identical to SEQ ID NO: 1144
  Description of Artificial Sequence: Synthetic Heavy chain variable region CDR H3 nucleic acid sequence

SEQ ID NO: 1369 - DNA, 327 bp, Artificial Sequence; identical to SEQ ID NO: 1257
  Description of Artificial Sequence: Synthetic Light chain variable region nucleic acid sequence

SEQ ID NO: 1370 - protein, 109 aa, Artificial Sequence; identical to SEQ ID NO: 1258
  Description of Artificial Sequence: Synthetic Light chain variable region amino acid sequence

SEQ ID NO: 1371 - protein, 14 aa, Artificial Sequence
  Description of Artificial Sequence: Synthetic Light chain variable region CDR L1 amino acid sequence
GSSTGAVTTSNYAN

SEQ ID NO: 1372 - DNA, 42 bp, Artificial Sequence; identical to SEQ ID NO: 204
  Description of Artificial Sequence: Synthetic Light chain variable region CDR L1 nucleic acid sequence

SEQ ID NO: 1373 - protein, 7 aa, Artificial Sequence
  Description of Artificial Sequence: Synthetic Light chain variable region CDR L2 amino acid sequence
GTDKRAP

SEQ ID NO: 1374 - DNA, 21 bp, Artificial Sequence
  Description of Artificial Sequence: Synthetic Light chain variable region CDR L2 nucleic acid sequence
ggcacagacaagcgcgctcct

SEQ ID NO: 1375 - protein, 9 aa, Artificial Sequence
  Description of Artificial Sequence: Synthetic Light chain variable region CDR L3 amino acid sequence
ALWYSNLWV

SEQ ID NO: 1376 - DNA, 27 bp, Artificial Sequence
  Description of Artificial Sequence: Synthetic Light chain variable region CDR L3 nucleic acid sequence
gcgctgtggtacagtaacctttgggtg

SEQ ID NO: 1377 - DNA, 375 bp, Artificial Sequence; identical to SEQ ID NO: 1201
  Description of Artificial Sequence: Synthetic Heavy chain variable region nucleic acid sequence

SEQ ID NO: 1378 - protein, 125 aa, Artificial Sequence; identical to SEQ ID NO: 1202
  Description of Artificial Sequence: Synthetic Heavy chain variable region amino acid sequence

SEQ ID NO: 1379 - protein, 9 aa, Artificial Sequence
  Description of Artificial Sequence: Synthetic Heavy chain variable region CDR H1 amino acid sequence
FTFDTYAMN

SEQ ID NO: 1380 - DNA, 27 bp, Artificial Sequence
  Description of Artificial Sequence: Synthetic Heavy chain variable region CDR H1 nucleic acid sequence
ttcacctttgacacatatgccatgaac

SEQ ID NO: 1381 - protein, 19 aa, Artificial Sequence
  Description of Artificial Sequence: Synthetic Heavy chain variable region CDR H2 amino acid sequence
RIRSKYNDYATYYADSVKD

SEQ ID NO: 1382 - DNA, 57 bp, Artificial Sequence; identical to SEQ ID NO: 422
  Description of Artificial Sequence: Synthetic Heavy chain variable region CDR H2 nucleic acid sequence

SEQ ID NO: 1383 - protein, 16 aa, Artificial Sequence
  Description of Artificial Sequence: Synthetic Heavy chain variable region CDR H3 amino acid sequence
VRHGNFGGAYVSWFAH

SEQ ID NO: 1384 - DNA, 48 bp, Artificial Sequence; identical to SEQ ID NO: 1208
  Description of Artificial Sequence: Synthetic Heavy chain variable region CDR H3 nucleic acid sequence

SEQ ID NO: 1385 - DNA, 327 bp, Artificial Sequence; identical to SEQ ID NO: 1257
  Description of Artificial Sequence: Synthetic Light chain variable region nucleic acid sequence

SEQ ID NO: 1386 - protein, 109 aa, Artificial Sequence; identical to SEQ ID NO: 1258
  Description of Artificial Sequence: Synthetic Light chain variable region amino acid sequence

SEQ ID NO: 1387 - protein, 14 aa, Artificial Sequence
  Description of Artificial Sequence: Synthetic Light chain variable region CDR L1 amino acid sequence
GSSTGAVTTSNYAN

SEQ ID NO: 1388 - DNA, 42 bp, Artificial Sequence; identical to SEQ ID NO: 204
  Description of Artificial Sequence: Synthetic Light chain variable region CDR L1 nucleic acid sequence

SEQ ID NO: 1389 - protein, 7 aa, Artificial Sequence
  Description of Artificial Sequence: Synthetic Light chain variable region CDR L2 amino acid sequence
GTDKRAP

SEQ ID NO: 1390 - DNA, 21 bp, Artificial Sequence
  Description of Artificial Sequence: Synthetic Light chain variable region CDR L2 nucleic acid sequence
ggcacagacaagcgcgctcct

SEQ ID NO: 1391 - protein, 9 aa, Artificial Sequence
  Description of Artificial Sequence: Synthetic Light chain variable region CDR L3 amino acid sequence
ALWYSNLWV

SEQ ID NO: 1392 - DNA, 27 bp, Artificial Sequence
  Description of Artificial Sequence: Synthetic Light chain variable region CDR L3 nucleic acid sequence
gcgctgtggtacagtaacctttgggtg

SEQ ID NO: 1393 - DNA, 375 bp, Artificial Sequence; identical to SEQ ID NO: 1217
  Description of Artificial Sequence: Synthetic Heavy chain variable region nucleic acid sequence

SEQ ID NO: 1394 - protein, 125 aa, Artificial Sequence; identical to SEQ ID NO: 1218
  Description of Artificial Sequence: Synthetic Heavy chain variable region amino acid sequence

SEQ ID NO: 1395 - protein, 9 aa, Artificial Sequence
  Description of Artificial Sequence: Synthetic Heavy chain variable region CDR H1 amino acid sequence
FTFDAYAMN

SEQ ID NO: 1396 - DNA, 27 bp, Artificial Sequence
  Description of Artificial Sequence: Synthetic Heavy chain variable region CDR H1 nucleic acid sequence
ttcacctttgacgcttatgccatgaac

SEQ ID NO: 1397 - protein, 19 aa, Artificial Sequence
  Description of Artificial Sequence: Synthetic Heavy chain variable region CDR H2 amino acid sequence
RIRSKYNDYATYYADSVKD

SEQ ID NO: 1398 - DNA, 57 bp, Artificial Sequence; identical to SEQ ID NO: 422
  Description of Artificial Sequence: Synthetic Heavy chain variable region CDR H2 nucleic acid sequence

SEQ ID NO: 1399 - protein, 16 aa, Artificial Sequence
  Description of Artificial Sequence: Synthetic Heavy chain variable region CDR H3 amino acid sequence
VRHGNFGGGYVSWFGH

SEQ ID NO: 1400 - DNA, 48 bp, Artificial Sequence; identical to SEQ ID NO: 1224
  Description of Artificial Sequence: Synthetic Heavy chain variable region CDR H3 nucleic acid sequence

SEQ ID NO: 1401 - DNA, 327 bp, Artificial Sequence; identical to SEQ ID NO: 1257
  Description of Artificial Sequence: Synthetic Light chain variable region nucleic acid sequence

SEQ ID NO: 1402 - protein, 109 aa, Artificial Sequence; identical to SEQ ID NO: 1258
  Description of Artificial Sequence: Synthetic Light chain variable region amino acid sequence

SEQ ID NO: 1403 - protein, 14 aa, Artificial Sequence
  Description of Artificial Sequence: Synthetic Light chain variable region CDR L1 amino acid sequence
GSSTGAVTTSNYAN

SEQ ID NO: 1404 - DNA, 42 bp, Artificial Sequence; identical to SEQ ID NO: 204
  Description of Artificial Sequence: Synthetic Light chain variable region CDR L1 nucleic acid sequence

SEQ ID NO: 1405 - protein, 7 aa, Artificial Sequence
  Description of Artificial Sequence: Synthetic Light chain variable region CDR L2 amino acid sequence
GTDKRAP

SEQ ID NO: 1406 - DNA, 21 bp, Artificial Sequence
  Description of Artificial Sequence: Synthetic Light chain variable region CDR L2 nucleic acid sequence
ggcacagacaagcgcgctcct

SEQ ID NO: 1407 - protein, 9 aa, Artificial Sequence
  Description of Artificial Sequence: Synthetic Light chain variable region CDR L3 amino acid sequence
ALWYSNLWV

SEQ ID NO: 1408 - DNA, 27 bp, Artificial Sequence
  Description of Artificial Sequence: Synthetic Light chain variable region CDR L3 nucleic acid sequence
gcgctgtggtacagtaacctttgggtg

SEQ ID NO: 1409 - DNA, 375 bp, Artificial Sequence
  Description of Artificial Sequence: Synthetic Heavy chain variable region nucleic acid sequence
gaggtgcagctgttggagtctgggggaggcttggtacagcctggggggtccctgagactctcctgtgcagcctctggattcacctttgacgcttatgccatgaactgggtgcgccaggctccagggaaggggctggagtgggtcgcaaggattagatccaagtataacgattacgctacatactacgcagactccgtgaaggatcggttcaccatctccagagacgattccaagagcacgctgtatctgcaaatggaaagcctgagagccgaggacacggcggtgtactactgcgtcaggcacggtaacgtggggggtggttacgtatcctggtttgctcattggggccaaggaaccctggtcaccgtctcctca

SEQ ID NO: 1410 - protein, 125 aa, Artificial Sequence
  Description of Artificial Sequence: Synthetic Heavy chain variable region amino acid sequence
EVQLLESGGGLVQPGGSLRLSCAASGFTFDAYAMNWVRQAPGKGLEWVARIRSKYNDYATYYADSVKDRFTISRDDSKSTLYLQMESLRAEDTAVYYCVRHGNVGGGYVSWFAHWGQGTLVTVSS

SEQ ID NO: 1411 - protein, 9 aa, Artificial Sequence
  Description of Artificial Sequence: Synthetic Heavy chain variable region CDR H1 amino acid sequence
FTFDAYAMN

SEQ ID NO: 1412 - DNA, 27 bp, Artificial Sequence
  Description of Artificial Sequence: Synthetic Heavy chain variable region CDR H1 nucleic acid sequence
ttcacctttgacgcttatgccatgaac

SEQ ID NO: 1413 - protein, 19 aa, Artificial Sequence
  Description of Artificial Sequence: Synthetic Heavy chain variable region CDR H2 amino acid sequence
RIRSKYNDYATYYADSVKD

SEQ ID NO: 1414 - DNA, 57 bp, Artificial Sequence; identical to SEQ ID NO: 422
  Description of Artificial Sequence: Synthetic Heavy chain variable region CDR H2 nucleic acid sequence

SEQ ID NO: 1415 - protein, 16 aa, Artificial Sequence
  Description of Artificial Sequence: Synthetic Heavy chain variable region CDR H3 amino acid sequence
VRHGNVGGGYVSWFAH

SEQ ID NO: 1416 - DNA, 48 bp, Artificial Sequence
  Description of Artificial Sequence: Synthetic Heavy chain variable region CDR H3 nucleic acid sequence
gtcaggcacggtaacgtggggggtggttacgtatcctggtttgctcat

SEQ ID NO: 1417 - DNA, 327 bp, Artificial Sequence; identical to SEQ ID NO: 1257
  Description of Artificial Sequence: Synthetic Light chain variable region nucleic acid sequence

SEQ ID NO: 1418 - protein, 109 aa, Artificial Sequence; identical to SEQ ID NO: 1258
  Description of Artificial Sequence: Synthetic Light chain variable region amino acid sequence

SEQ ID NO: 1419 - protein, 14 aa, Artificial Sequence
  Description of Artificial Sequence: Synthetic Light chain variable region CDR L1 amino acid sequence
GSSTGAVTTSNYAN

SEQ ID NO: 1420 - DNA, 42 bp, Artificial Sequence; identical to SEQ ID NO: 204
  Description of Artificial Sequence: Synthetic Light chain variable region CDR L1 nucleic acid sequence

SEQ ID NO: 1421 - protein, 7 aa, Artificial Sequence
  Description of Artificial Sequence: Synthetic Light chain variable region CDR L2 amino acid sequence
GTDKRAP

SEQ ID NO: 1422 - DNA, 21 bp, Artificial Sequence
  Description of Artificial Sequence: Synthetic Light chain variable region CDR L2 nucleic acid sequence
ggcacagacaagcgcgctcct

SEQ ID NO: 1423 - protein, 9 aa, Artificial Sequence
  Description of Artificial Sequence: Synthetic Light chain variable region CDR L3 amino acid sequence
ALWYSNLWV

SEQ ID NO: 1424 - DNA, 27 bp, Artificial Sequence
  Description of Artificial Sequence: Synthetic Light chain variable region CDR L3 nucleic acid sequence
gcgctgtggtacagtaacctttgggtg

SEQ ID NO: 1425 - DNA, 375 bp, Artificial Sequence; identical to SEQ ID NO: 1233
  Description of Artificial Sequence: Synthetic Heavy chain variable region nucleic acid sequence

SEQ ID NO: 1426 - protein, 125 aa, Artificial Sequence; identical to SEQ ID NO: 1234
  Description of Artificial Sequence: Synthetic Heavy chain variable region amino acid sequence

SEQ ID NO: 1427 - protein, 9 aa, Artificial Sequence
  Description of Artificial Sequence: Synthetic Heavy chain variable region CDR H1 amino acid sequence
FTFDAYAMN

SEQ ID NO: 1428 - DNA, 27 bp, Artificial Sequence
  Description of Artificial Sequence: Synthetic Heavy chain variable region CDR H1 nucleic acid sequence
ttcacctttgacgcttatgccatgaac

SEQ ID NO: 1429 - protein, 19 aa, Artificial Sequence
  Description of Artificial Sequence: Synthetic Heavy chain variable region CDR H2 amino acid sequence
RIRSKYNDYATYYADSVKD

SEQ ID NO: 1430 - DNA, 57 bp, Artificial Sequence; identical to SEQ ID NO: 422
  Description of Artificial Sequence: Synthetic Heavy chain variable region CDR H2 nucleic acid sequence

SEQ ID NO: 1431 - protein, 16 aa, Artificial Sequence
  Description of Artificial Sequence: Synthetic Heavy chain variable region CDR H3 amino acid sequence
VRHGNFGNYAVSWFAH

SEQ ID NO: 1432 - DNA, 48 bp, Artificial Sequence; identical to SEQ ID NO: 1240
  Description of Artificial Sequence: Synthetic Heavy chain variable region CDR H3 nucleic acid sequence

SEQ ID NO: 1433 - DNA, 327 bp, Artificial Sequence; identical to SEQ ID NO: 1257
  Description of Artificial Sequence: Synthetic Light chain variable region nucleic acid sequence

SEQ ID NO: 1434 - protein, 109 aa, Artificial Sequence; identical to SEQ ID NO: 1258
  Description of Artificial Sequence: Synthetic Light chain variable region amino acid sequence

SEQ ID NO: 1435 - protein, 14 aa, Artificial Sequence
  Description of Artificial Sequence: Synthetic Light chain variable region CDR L1 amino acid sequence
GSSTGAVTTSNYAN

SEQ ID NO: 1436 - DNA, 42 bp, Artificial Sequence; identical to SEQ ID NO: 204
  Description of Artificial Sequence: Synthetic Light chain variable region CDR L1 nucleic acid sequence

SEQ ID NO: 1437 - protein, 7 aa, Artificial Sequence
  Description of Artificial Sequence: Synthetic Light chain variable region CDR L2 amino acid sequence
GTDKRAP

SEQ ID NO: 1438 - DNA, 21 bp, Artificial Sequence
  Description of Artificial Sequence: Synthetic Light chain variable region CDR L2 nucleic acid sequence
ggcacagacaagcgcgctcct

SEQ ID NO: 1439 - protein, 9 aa, Artificial Sequence
  Description of Artificial Sequence: Synthetic Light chain variable region CDR L3 amino acid sequence
ALWYSNLWV

SEQ ID NO: 1440 - DNA, 27 bp, Artificial Sequence
  Description of Artificial Sequence: Synthetic Light chain variable region CDR L3 nucleic acid sequence
gcgctgtggtacagtaacctttgggtg

SEQ ID NO: 1441 - DNA, 375 bp, Artificial Sequence; identical to SEQ ID NO: 1057
  Description of Artificial Sequence: Synthetic Heavy chain variable region nucleic acid sequence

SEQ ID NO: 1442 - protein, 125 aa, Artificial Sequence; identical to SEQ ID NO: 1058
  Description of Artificial Sequence: Synthetic Heavy chain variable region amino acid sequence

SEQ ID NO: 1443 - protein, 9 aa, Artificial Sequence
  Description of Artificial Sequence: Synthetic Heavy chain variable region CDR H1 amino acid sequence
FTFDTYAMN

SEQ ID NO: 1444 - DNA, 27 bp, Artificial Sequence
  Description of Artificial Sequence: Synthetic Heavy chain variable region CDR H1 nucleic acid sequence
ttcacctttgacacatatgccatgaac

SEQ ID NO: 1445 - protein, 19 aa, Artificial Sequence
  Description of Artificial Sequence: Synthetic Heavy chain variable region CDR H2 amino acid sequence
RIRSKYNNYATYYADSVKD

SEQ ID NO: 1446 - DNA, 57 bp, Artificial Sequence; identical to SEQ ID NO: 6
  Description of Artificial Sequence: Synthetic Heavy chain variable region CDR H2 nucleic acid sequence

SEQ ID NO: 1447 - protein, 16 aa, Artificial Sequence
  Description of Artificial Sequence: Synthetic Heavy chain variable region CDR H3 amino acid sequence
VRHGNFQGGYVSWFAH

SEQ ID NO: 1448 - DNA, 48 bp, Artificial Sequence; identical to SEQ ID NO: 1064
  Description of Artificial Sequence: Synthetic Heavy chain variable region CDR H3 nucleic acid sequence

SEQ ID NO: 1449 - DNA, 327 bp, Artificial Sequence; identical to SEQ ID NO: 425
  Description of Artificial Sequence: Synthetic Light chain variable region nucleic acid sequence

SEQ ID NO: 1450 - protein, 109 aa, Artificial Sequence; identical to SEQ ID NO: 426
  Description of Artificial Sequence: Synthetic Light chain variable region amino acid sequence

SEQ ID NO: 1451 - protein, 14 aa, Artificial Sequence
  Description of Artificial Sequence: Synthetic Light chain variable region CDR L1 amino acid sequence
GSSTGAVTTSNYAN

SEQ ID NO: 1452 - DNA, 42 bp, Artificial Sequence; identical to SEQ ID NO: 204
  Description of Artificial Sequence: Synthetic Light chain variable region CDR L1 nucleic acid sequence

SEQ ID NO: 1453 - protein, 7 aa, Artificial Sequence
  Description of Artificial Sequence: Synthetic Light chain variable region CDR L2 amino acid sequence
GTDKRAP

SEQ ID NO: 1454 - DNA, 21 bp, Artificial Sequence
  Description of Artificial Sequence: Synthetic Light chain variable region CDR L2 nucleic acid sequence
ggcacagacaagcgcgctcct

SEQ ID NO: 1455 - protein, 9 aa, Artificial Sequence
  Description of Artificial Sequence: Synthetic Light chain variable region CDR L3 amino acid sequence
ALWYSDLWV

SEQ ID NO: 1456 - DNA, 27 bp, Artificial Sequence
  Description of Artificial Sequence: Synthetic Light chain variable region CDR L3 nucleic acid sequence
gcgctgtggtacagtgatctgtgggtg

SEQ ID NO: 1457 - DNA, 375 bp, Artificial Sequence; identical to SEQ ID NO: 1073
  Description of Artificial Sequence: Synthetic Heavy chain variable region nucleic acid sequence

SEQ ID NO: 1458 - protein, 125 aa, Artificial Sequence; identical to SEQ ID NO: 1074
  Description of Artificial Sequence: Synthetic Heavy chain variable region amino acid sequence

SEQ ID NO: 1459 - protein, 9 aa, Artificial Sequence
  Description of Artificial Sequence: Synthetic Heavy chain variable region CDR H1 amino acid sequence
FTFDTYAMN

SEQ ID NO: 1460 - DNA, 27 bp, Artificial Sequence
  Description of Artificial Sequence: Synthetic Heavy chain variable region CDR H1 nucleic acid sequence
ttcacctttgacacatatgccatgaac

SEQ ID NO: 1461 - protein, 19 aa, Artificial Sequence
  Description of Artificial Sequence: Synthetic Heavy chain variable region CDR H2 amino acid sequence
RIRSKYNNYATYYADSVKD

SEQ ID NO: 1462 - DNA, 57 bp, Artificial Sequence; identical to SEQ ID NO: 6
  Description of Artificial Sequence: Synthetic Heavy chain variable region CDR H2 nucleic acid sequence

SEQ ID NO: 1463 - protein, 16 aa, Artificial Sequence
  Description of Artificial Sequence: Synthetic Heavy chain variable region CDR H3 amino acid sequence
VRHGNFGGGYVSWFAW

SEQ ID NO: 1464 - DNA, 48 bp, Artificial Sequence; identical to SEQ ID NO: 1080
  Description of Artificial Sequence: Synthetic Heavy chain variable region CDR H3 nucleic acid sequence

SEQ ID NO: 1465 - DNA, 327 bp, Artificial Sequence; identical to SEQ ID NO: 425
  Description of Artificial Sequence: Synthetic Light chain variable region nucleic acid sequence

SEQ ID NO: 1466 - protein, 109 aa, Artificial Sequence; identical to SEQ ID NO: 426
  Description of Artificial Sequence: Synthetic Light chain variable region amino acid sequence

SEQ ID NO: 1467 - protein, 14 aa, Artificial Sequence
  Description of Artificial Sequence: Synthetic Light chain variable region CDR L1 amino acid sequence
GSSTGAVTTSNYAN

SEQ ID NO: 1468 - DNA, 42 bp, Artificial Sequence; identical to SEQ ID NO: 204
  Description of Artificial Sequence: Synthetic Light chain variable region CDR L1 nucleic acid sequence

SEQ ID NO: 1469 - protein, 7 aa, Artificial Sequence
  Description of Artificial Sequence: Synthetic Light chain variable region CDR L2 amino acid sequence
GTDKRAP

SEQ ID NO: 1470 - DNA, 21 bp, Artificial Sequence
  Description of Artificial Sequence: Synthetic Light chain variable region CDR L2 nucleic acid sequence
ggcacagacaagcgcgctcct

SEQ ID NO: 1471 - protein, 9 aa, Artificial Sequence
  Description of Artificial Sequence: Synthetic Light chain variable region CDR L3 amino acid sequence
ALWYSDLWV

SEQ ID NO: 1472 - DNA, 27 bp, Artificial Sequence
  Description of Artificial Sequence: Synthetic Light chain variable region CDR L3 nucleic acid sequence
gcgctgtggtacagtgatctgtgggtg

SEQ ID NO: 1473 - DNA, 375 bp, Artificial Sequence; identical to SEQ ID NO: 1089
  Description of Artificial Sequence: Synthetic Heavy chain variable region nucleic acid sequence

SEQ ID NO: 1474 - protein, 125 aa, Artificial Sequence; identical to SEQ ID NO: 1090
  Description of Artificial Sequence: Synthetic Heavy chain variable region amino acid sequence

SEQ ID NO: 1475 - protein, 9 aa, Artificial Sequence
  Description of Artificial Sequence: Synthetic Heavy chain variable region CDR H1 amino acid sequence
FTFDTYAMN

SEQ ID NO: 1476 - DNA, 27 bp, Artificial Sequence
  Description of Artificial Sequence: Synthetic Heavy chain variable region CDR H1 nucleic acid sequence
ttcacctttgacacatatgccatgaac

SEQ ID NO: 1477 - protein, 19 aa, Artificial Sequence
  Description of Artificial Sequence: Synthetic Heavy chain variable region CDR H2 amino acid sequence
RIRSKYNNYATYYADSVKD

SEQ ID NO: 1478 - DNA, 57 bp, Artificial Sequence; identical to SEQ ID NO: 6
  Description of Artificial Sequence: Synthetic Heavy chain variable region CDR H2 nucleic acid sequence

SEQ ID NO: 1479 - protein, 16 aa, Artificial Sequence
  Description of Artificial Sequence: Synthetic Heavy chain variable region CDR H3 amino acid sequence
VRHANFGAGYVSWFAH

SEQ ID NO: 1480 - DNA, 48 bp, Artificial Sequence; identical to SEQ ID NO: 1096
  Description of Artificial Sequence: Synthetic Heavy chain variable region CDR H3 nucleic acid sequence

SEQ ID NO: 1481 - DNA, 327 bp, Artificial Sequence; identical to SEQ ID NO: 425
  Description of Artificial Sequence: Synthetic Light chain variable region nucleic acid sequence

SEQ ID NO: 1482 - protein, 109 aa, Artificial Sequence; identical to SEQ ID NO: 426
  Description of Artificial Sequence: Synthetic Light chain variable region amino acid sequence

SEQ ID NO: 1483 - protein, 14 aa, Artificial Sequence
  Description of Artificial Sequence: Synthetic Light chain variable region CDR L1 amino acid sequence
GSSTGAVTTSNYAN

SEQ ID NO: 1484 - DNA, 42 bp, Artificial Sequence; identical to SEQ ID NO: 204
  Description of Artificial Sequence: Synthetic Light chain variable region CDR L1 nucleic acid sequence

SEQ ID NO: 1485 - protein, 7 aa, Artificial Sequence
  Description of Artificial Sequence: Synthetic Light chain variable region CDR L2 amino acid sequence
GTDKRAP

SEQ ID NO: 1486 - DNA, 21 bp, Artificial Sequence
  Description of Artificial Sequence: Synthetic Light chain variable region CDR L2 nucleic acid sequence
ggcacagacaagcgcgctcct

SEQ ID NO: 1487 - protein, 9 aa, Artificial Sequence
  Description of Artificial Sequence: Synthetic Light chain variable region CDR L3 amino acid sequence
ALWYSDLWV

SEQ ID NO: 1488 - DNA, 27 bp, Artificial Sequence
  Description of Artificial Sequence: Synthetic Light chain variable region CDR L3 nucleic acid sequence
gcgctgtggtacagtgatctgtgggtg

SEQ ID NO: 1489 - DNA, 375 bp, Artificial Sequence; identical to SEQ ID NO: 1105
  Description of Artificial Sequence: Synthetic Heavy chain variable region nucleic acid sequence

SEQ ID NO: 1490 - protein, 125 aa, Artificial Sequence; identical to SEQ ID NO: 482
  Description of Artificial Sequence: Synthetic Heavy chain variable region amino acid sequence

SEQ ID NO: 1491 - protein, 9 aa, Artificial Sequence
  Description of Artificial Sequence: Synthetic Heavy chain variable region CDR H1 amino acid sequence
FTFDTYAMN

SEQ ID NO: 1492 - DNA, 27 bp, Artificial Sequence
  Description of Artificial Sequence: Synthetic Heavy chain variable region CDR H1 nucleic acid sequence
ttcacctttgacacatatgccatgaac

SEQ ID NO: 1493 - protein, 19 aa, Artificial Sequence
  Description of Artificial Sequence: Synthetic Heavy chain variable region CDR H2 amino acid sequence
RIRSKYNNYATYYADSVKD

SEQ ID NO: 1494 - DNA, 57 bp, Artificial Sequence; identical to SEQ ID NO: 6
  Description of Artificial Sequence: Synthetic Heavy chain variable region CDR H2 nucleic acid sequence

SEQ ID NO: 1495 - protein, 16 aa, Artificial Sequence
  Description of Artificial Sequence: Synthetic Heavy chain variable region CDR H3 amino acid sequence
VRHGNFGEGYVSWFAH

SEQ ID NO: 1496 - DNA, 48 bp, Artificial Sequence; identical to SEQ ID NO: 472
  Description of Artificial Sequence: Synthetic Heavy chain variable region CDR H3 nucleic acid sequence

SEQ ID NO: 1497 - DNA, 327 bp, Artificial Sequence; identical to SEQ ID NO: 425
  Description of Artificial Sequence: Synthetic Light chain variable region nucleic acid sequence

SEQ ID NO: 1498 - protein, 109 aa, Artificial Sequence; identical to SEQ ID NO: 426
  Description of Artificial Sequence: Synthetic Light chain variable region amino acid sequence

SEQ ID NO: 1499 - protein, 14 aa, Artificial Sequence
  Description of Artificial Sequence: Synthetic Light chain variable region CDR L1 amino acid sequence
GSSTGAVTTSNYAN

SEQ ID NO: 1500 - DNA, 42 bp, Artificial Sequence; identical to SEQ ID NO: 204
  Description of Artificial Sequence: Synthetic Light chain variable region CDR L1 nucleic acid sequence

SEQ ID NO: 1501 - protein, 7 aa, Artificial Sequence
  Description of Artificial Sequence: Synthetic Light chain variable region CDR L2 amino acid sequence
GTDKRAP

SEQ ID NO: 1502 - DNA, 21 bp, Artificial Sequence
  Description of Artificial Sequence: Synthetic Light chain variable region CDR L2 nucleic acid sequence
ggcacagacaagcgcgctcct

SEQ ID NO: 1503 - protein, 9 aa, Artificial Sequence
  Description of Artificial Sequence: Synthetic Light chain variable region CDR L3 amino acid sequence
ALWYSDLWV

SEQ ID NO: 1504 - DNA, 27 bp, Artificial Sequence
  Description of Artificial Sequence: Synthetic Light chain variable region CDR L3 nucleic acid sequence
gcgctgtggtacagtgatctgtgggtg

SEQ ID NO: 1505 - DNA, 375 bp, Artificial Sequence; identical to SEQ ID NO: 1121
  Description of Artificial Sequence: Synthetic Heavy chain variable region nucleic acid sequence

SEQ ID NO: 1506 - protein, 125 aa, Artificial Sequence; identical to SEQ ID NO: 1122
  Description of Artificial Sequence: Synthetic Heavy chain variable region amino acid sequence

SEQ ID NO: 1507 - protein, 9 aa, Artificial Sequence
  Description of Artificial Sequence: Synthetic Heavy chain variable region CDR H1 amino acid sequence
FTFDTYAMN

SEQ ID NO: 1508 - DNA, 27 bp, Artificial Sequence
  Description of Artificial Sequence: Synthetic Heavy chain variable region CDR H1 nucleic acid sequence
ttcacctttgacacatatgccatgaac

SEQ ID NO: 1509 - protein, 19 aa, Artificial Sequence
  Description of Artificial Sequence: Synthetic Heavy chain variable region CDR H2 amino acid sequence
RIRSKYNNYATYYADSVKD

SEQ ID NO: 1510 - DNA, 57 bp, Artificial Sequence; identical to SEQ ID NO: 6
  Description of Artificial Sequence: Synthetic Heavy chain variable region CDR H2 nucleic acid sequence

SEQ ID NO: 1511 - protein, 16 aa, Artificial Sequence
  Description of Artificial Sequence: Synthetic Heavy chain variable region CDR H3 amino acid sequence
VRHDNFGAGYVSWFAH

SEQ ID NO: 1512 - DNA, 48 bp, Artificial Sequence; identical to SEQ ID NO: 1128
  Description of Artificial Sequence: Synthetic Heavy chain variable region CDR H3 nucleic acid sequence

SEQ ID NO: 1513 - DNA, 327 bp, Artificial Sequence; identical to SEQ ID NO: 425
  Description of Artificial Sequence: Synthetic Light chain variable region nucleic acid sequence

SEQ ID NO: 1514 - protein, 109 aa, Artificial Sequence; identical to SEQ ID NO: 426
  Description of Artificial Sequence: Synthetic Light chain variable region amino acid sequence

SEQ ID NO: 1515 - protein, 14 aa, Artificial Sequence
  Description of Artificial Sequence: Synthetic Light chain variable region CDR L1 amino acid sequence
GSSTGAVTTSNYAN

SEQ ID NO: 1516 - DNA, 42 bp, Artificial Sequence; identical to SEQ ID NO: 204
  Description of Artificial Sequence: Synthetic Light chain variable region CDR L1 nucleic acid sequence

SEQ ID NO: 1517 - protein, 7 aa, Artificial Sequence
  Description of Artificial Sequence: Synthetic Light chain variable region CDR L2 amino acid sequence
GTDKRAP

SEQ ID NO: 1518 - DNA, 21 bp, Artificial Sequence
  Description of Artificial Sequence: Synthetic Light chain variable region CDR L2 nucleic acid sequence
ggcacagacaagcgcgctcct

SEQ ID NO: 1519 - protein, 9 aa, Artificial Sequence
  Description of Artificial Sequence: Synthetic Light chain variable region CDR L3 amino acid sequence
ALWYSDLWV

SEQ ID NO: 1520 - DNA, 27 bp, Artificial Sequence
  Description of Artificial Sequence: Synthetic Light chain variable region CDR L3 nucleic acid sequence
gcgctgtggtacagtgatctgtgggtg

SEQ ID NO: 1521 - DNA, 375 bp, Artificial Sequence; identical to SEQ ID NO: 1137
  Description of Artificial Sequence: Synthetic Heavy chain variable region nucleic acid sequence

SEQ ID NO: 1522 - protein, 125 aa, Artificial Sequence; identical to SEQ ID NO: 1138
  Description of Artificial Sequence: Synthetic Heavy chain variable region amino acid sequence

SEQ ID NO: 1523 - protein, 9 aa, Artificial Sequence
  Description of Artificial Sequence: Synthetic Heavy chain variable region CDR H1 amino acid sequence
FTFDTYAMN

SEQ ID NO: 1524 - DNA, 27 bp, Artificial Sequence
  Description of Artificial Sequence: Synthetic Heavy chain variable region CDR H1 nucleic acid sequence
ttcacctttgacacatatgccatgaac

SEQ ID NO: 1525 - protein, 19 aa, Artificial Sequence
  Description of Artificial Sequence: Synthetic Heavy chain variable region CDR H2 amino acid sequence
RIRSKYNNYATYYADSVKD

SEQ ID NO: 1526 - DNA, 57 bp, Artificial Sequence; identical to SEQ ID NO: 6
  Description of Artificial Sequence: Synthetic Heavy chain variable region CDR H2 nucleic acid sequence

SEQ ID NO: 1527 - protein, 16 aa, Artificial Sequence
  Description of Artificial Sequence: Synthetic Heavy chain variable region CDR H3 amino acid sequence
VRHGNFGVGYVSWFAS

SEQ ID NO: 1528 - DNA, 48 bp, Artificial Sequence; identical to SEQ ID NO: 1144
  Description of Artificial Sequence: Synthetic Heavy chain variable region CDR H3 nucleic acid sequence

SEQ ID NO: 1529 - DNA, 327 bp, Artificial Sequence; identical to SEQ ID NO: 425
  Description of Artificial Sequence: Synthetic Light chain variable region nucleic acid sequence

SEQ ID NO: 1530 - protein, 109 aa, Artificial Sequence; identical to SEQ ID NO: 426
  Description of Artificial Sequence: Synthetic Light chain variable region amino acid sequence

SEQ ID NO: 1531 - protein, 14 aa, Artificial Sequence
  Description of Artificial Sequence: Synthetic Light chain variable region CDR L1 amino acid sequence
GSSTGAVTTSNYAN

SEQ ID NO: 1532 - DNA, 42 bp, Artificial Sequence; identical to SEQ ID NO: 204
  Description of Artificial Sequence: Synthetic Light chain variable region CDR L1 nucleic acid sequence

SEQ ID NO: 1533 - protein, 7 aa, Artificial Sequence
  Description of Artificial Sequence: Synthetic Light chain variable region CDR L2 amino acid sequence
GTDKRAP

SEQ ID NO: 1534 - DNA, 21 bp, Artificial Sequence
  Description of Artificial Sequence: Synthetic Light chain variable region CDR L2 nucleic acid sequence
ggcacagacaagcgcgctcct

SEQ ID NO: 1535 - protein, 9 aa, Artificial Sequence
  Description of Artificial Sequence: Synthetic Light chain variable region CDR L3 amino acid sequence
ALWYSDLWV

SEQ ID NO: 1536 - DNA, 27 bp, Artificial Sequence
  Description of Artificial Sequence: Synthetic Light chain variable region CDR L3 nucleic acid sequence
gcgctgtggtacagtgatctgtgggtg

SEQ ID NO: 1537 - DNA, 375 bp, Artificial Sequence; identical to SEQ ID NO: 1313
  Description of Artificial Sequence: Synthetic Heavy chain variable region nucleic acid sequence

SEQ ID NO: 1538 - protein, 125 aa, Artificial Sequence; identical to SEQ ID NO: 1314
  Description of Artificial Sequence: Synthetic Heavy chain variable region amino acid sequence

SEQ ID NO: 1539 - protein, 9 aa, Artificial Sequence
  Description of Artificial Sequence: Synthetic Heavy chain variable region CDR H1 amino acid sequence
FTFDTYAMN

SEQ ID NO: 1540 - DNA, 27 bp, Artificial Sequence
  Description of Artificial Sequence: Synthetic Heavy chain variable region CDR H1 nucleic acid sequence
ttcacctttgacacatatgccatgaac

SEQ ID NO: 1541 - protein, 19 aa, Artificial Sequence
  Description of Artificial Sequence: Synthetic Heavy chain variable region CDR H2 amino acid sequence
RIRSKYNNYATYYADSVKD

SEQ ID NO: 1542 - DNA, 57 bp, Artificial Sequence; identical to SEQ ID NO: 6
  Description of Artificial Sequence: Synthetic Heavy chain variable region CDR H2 nucleic acid sequence

SEQ ID NO: 1543 - protein, 16 aa, Artificial Sequence
  Description of Artificial Sequence: Synthetic Heavy chain variable region CDR H3 amino acid sequence
VRHGNFGGAYVSWFAH

SEQ ID NO: 1544 - DNA, 48 bp, Artificial Sequence; identical to SEQ ID NO: 1208
  Description of Artificial Sequence: Synthetic Heavy chain variable region CDR H3 nucleic acid sequence

SEQ ID NO: 1545 - DNA, 327 bp, Artificial Sequence; identical to SEQ ID NO: 425
  Description of Artificial Sequence: Synthetic Light chain variable region nucleic acid sequence

SEQ ID NO: 1546 - protein, 109 aa, Artificial Sequence; identical to SEQ ID NO: 426
  Description of Artificial Sequence: Synthetic Light chain variable region amino acid sequence

SEQ ID NO: 1547 - protein, 14 aa, Artificial Sequence
  Description of Artificial Sequence: Synthetic Light chain variable region CDR L1 amino acid sequence
GSSTGAVTTSNYAN

SEQ ID NO: 1548 - DNA, 42 bp, Artificial Sequence; identical to SEQ ID NO: 204
  Description of Artificial Sequence: Synthetic Light chain variable region CDR L1 nucleic acid sequence

SEQ ID NO: 1549 - protein, 7 aa, Artificial Sequence
  Description of Artificial Sequence: Synthetic Light chain variable region CDR L2 amino acid sequence
GTDKRAP

SEQ ID NO: 1550 - DNA, 21 bp, Artificial Sequence
  Description of Artificial Sequence: Synthetic Light chain variable region CDR L2 nucleic acid sequence
ggcacagacaagcgcgctcct

SEQ ID NO: 1551 - protein, 9 aa, Artificial Sequence
  Description of Artificial Sequence: Synthetic Light chain variable region CDR L3 amino acid sequence
ALWYSDLWV

SEQ ID NO: 1552 - DNA, 27 bp, Artificial Sequence
  Description of Artificial Sequence: Synthetic Light chain variable region CDR L3 nucleic acid sequence
gcgctgtggtacagtgatctgtgggtg

SEQ ID NO: 1553 - DNA, 375 bp, Artificial Sequence; identical to SEQ ID NO: 1153
  Description of Artificial Sequence: Synthetic Heavy chain variable region nucleic acid sequence

SEQ ID NO: 1554 - protein, 125 aa, Artificial Sequence; identical to SEQ ID NO: 1154
  Description of Artificial Sequence: Synthetic Heavy chain variable region amino acid sequence

SEQ ID NO: 1555 - protein, 9 aa, Artificial Sequence
  Description of Artificial Sequence: Synthetic Heavy chain variable region CDR H1 amino acid sequence
FTFDTYAMN

SEQ ID NO: 1556 - DNA, 27 bp, Artificial Sequence
  Description of Artificial Sequence: Synthetic Heavy chain variable region CDR H1 nucleic acid sequence
ttcacctttgacacatatgccatgaac

SEQ ID NO: 1557 - protein, 19 aa, Artificial Sequence
  Description of Artificial Sequence: Synthetic Heavy chain variable region CDR H2 amino acid sequence
RIRSKYNDYATYYADSVKD

SEQ ID NO: 1558 - DNA, 57 bp, Artificial Sequence; identical to SEQ ID NO: 422
  Description of Artificial Sequence: Synthetic Heavy chain variable region CDR H2 nucleic acid sequence

SEQ ID NO: 1559 - protein, 16 aa, Artificial Sequence
  Description of Artificial Sequence: Synthetic Heavy chain variable region CDR H3 amino acid sequence
VRHGNFGEGYVSWFAH

SEQ ID NO: 1560 - DNA, 48 bp, Artificial Sequence; identical to SEQ ID NO: 472
  Description of Artificial Sequence: Synthetic Heavy chain variable region CDR H3 nucleic acid sequence

SEQ ID NO: 1561 - DNA, 327 bp, Artificial Sequence; identical to SEQ ID NO: 425
  Description of Artificial Sequence: Synthetic Light chain variable region nucleic acid sequence

SEQ ID NO: 1562 - protein, 109 aa, Artificial Sequence; identical to SEQ ID NO: 426
  Description of Artificial Sequence: Synthetic Light chain variable region amino acid sequence

SEQ ID NO: 1563 - protein, 14 aa, Artificial Sequence
  Description of Artificial Sequence: Synthetic Light chain variable region CDR L1 amino acid sequence
GSSTGAVTTSNYAN

SEQ ID NO: 1564 - DNA, 42 bp, Artificial Sequence; identical to SEQ ID NO: 204
  Description of Artificial Sequence: Synthetic Light chain variable region CDR L1 nucleic acid sequence

SEQ ID NO: 1565 - protein, 7 aa, Artificial Sequence
  Description of Artificial Sequence: Synthetic Light chain variable region CDR L2 amino acid sequence
GTDKRAP

SEQ ID NO: 1566 - DNA, 21 bp, Artificial Sequence
  Description of Artificial Sequence: Synthetic Light chain variable region CDR L2 nucleic acid sequence
ggcacagacaagcgcgctcct

SEQ ID NO: 1567 - protein, 9 aa, Artificial Sequence
  Description of Artificial Sequence: Synthetic Light chain variable region CDR L3 amino acid sequence
ALWYSDLWV

SEQ ID NO: 1568 - DNA, 27 bp, Artificial Sequence
  Description of Artificial Sequence: Synthetic Light chain variable region CDR L3 nucleic acid sequence
gcgctgtggtacagtgatctgtgggtg

SEQ ID NO: 1569 - DNA, 375 bp, Artificial Sequence; identical to SEQ ID NO: 1169
  Description of Artificial Sequence: Synthetic Heavy chain variable region nucleic acid sequence

SEQ ID NO: 1570 - protein, 125 aa, Artificial Sequence; identical to SEQ ID NO: 1170
  Description of Artificial Sequence: Synthetic Heavy chain variable region amino acid sequence

SEQ ID NO: 1571 - protein, 9 aa, Artificial Sequence
  Description of Artificial Sequence: Synthetic Heavy chain variable region CDR H1 amino acid sequence
FTFDTYAMN

SEQ ID NO: 1572 - DNA, 27 bp, Artificial Sequence
  Description of Artificial Sequence: Synthetic Heavy chain variable region CDR H1 nucleic acid sequence
ttcacctttgacacatatgccatgaac

SEQ ID NO: 1573 - protein, 19 aa, Artificial Sequence
  Description of Artificial Sequence: Synthetic Heavy chain variable region CDR H2 amino acid sequence
RIRSKYNDYATYYADSVKD

SEQ ID NO: 1574 - DNA, 57 bp, Artificial Sequence; identical to SEQ ID NO: 422
  Description of Artificial Sequence: Synthetic Heavy chain variable region CDR H2 nucleic acid sequence

SEQ ID NO: 1575 - protein, 16 aa, Artificial Sequence
  Description of Artificial Sequence: Synthetic Heavy chain variable region CDR H3 amino acid sequence
VRHDNFGAGYVSWFAH

SEQ ID NO: 1576 - DNA, 48 bp, Artificial Sequence; identical to SEQ ID NO: 1128
  Description of Artificial Sequence: Synthetic Heavy chain variable region CDR H3 nucleic acid sequence

SEQ ID NO: 1577 - DNA, 327 bp, Artificial Sequence; identical to SEQ ID NO: 425
  Description of Artificial Sequence: Synthetic Light chain variable region nucleic acid sequence

SEQ ID NO: 1578 - protein, 109 aa, Artificial Sequence; identical to SEQ ID NO: 426
  Description of Artificial Sequence: Synthetic Light chain variable region amino acid sequence

SEQ ID NO: 1579 - protein, 14 aa, Artificial Sequence
  Description of Artificial Sequence: Synthetic Light chain variable region CDR L1 amino acid sequence
GSSTGAVTTSNYAN

SEQ ID NO: 1580 - DNA, 42 bp, Artificial Sequence; identical to SEQ ID NO: 204
  Description of Artificial Sequence: Synthetic Light chain variable region CDR L1 nucleic acid sequence

SEQ ID NO: 1581 - protein, 7 aa, Artificial Sequence
  Description of Artificial Sequence: Synthetic Light chain variable region CDR L2 amino acid sequence
GTDKRAP

SEQ ID NO: 1582 - DNA, 21 bp, Artificial Sequence
  Description of Artificial Sequence: Synthetic Light chain variable region CDR L2 nucleic acid sequence
ggcacagacaagcgcgctcct

SEQ ID NO: 1583 - protein, 9 aa, Artificial Sequence
  Description of Artificial Sequence: Synthetic Light chain variable region CDR L3 amino acid sequence
ALWYSDLWV

SEQ ID NO: 1584 - DNA, 27 bp, Artificial Sequence
  Description of Artificial Sequence: Synthetic Light chain variable region CDR L3 nucleic acid sequence
gcgctgtggtacagtgatctgtgggtg

SEQ ID NO: 1585 - DNA, 375 bp, Artificial Sequence; identical to SEQ ID NO: 1185
  Description of Artificial Sequence: Synthetic Heavy chain variable region nucleic acid sequence

SEQ ID NO: 1586 - protein, 125 aa, Artificial Sequence; identical to SEQ ID NO: 1186
  Description of Artificial Sequence: Synthetic Heavy chain variable region amino acid sequence

SEQ ID NO: 1587 - protein, 9 aa, Artificial Sequence
  Description of Artificial Sequence: Synthetic Heavy chain variable region CDR H1 amino acid sequence
FTFDTYAMN

SEQ ID NO: 1588 - DNA, 27 bp, Artificial Sequence
  Description of Artificial Sequence: Synthetic Heavy chain variable region CDR H1 nucleic acid sequence
ttcacctttgacacatatgccatgaac

SEQ ID NO: 1589 - protein, 19 aa, Artificial Sequence
  Description of Artificial Sequence: Synthetic Heavy chain variable region CDR H2 amino acid sequence
RIRSKYNDYATYYADSVKD

SEQ ID NO: 1590 - DNA, 57 bp, Artificial Sequence; identical to SEQ ID NO: 422
  Description of Artificial Sequence: Synthetic Heavy chain variable region CDR H2 nucleic acid sequence

SEQ ID NO: 1591 - protein, 16 aa, Artificial Sequence
  Description of Artificial Sequence: Synthetic Heavy chain variable region CDR H3 amino acid sequence
VRHGNFGVGYVSWFAS

SEQ ID NO: 1592 - DNA, 48 bp, Artificial Sequence; identical to SEQ ID NO: 1144
  Description of Artificial Sequence: Synthetic Heavy chain variable region CDR H3 nucleic acid sequence

SEQ ID NO: 1593 - DNA, 327 bp, Artificial Sequence; identical to SEQ ID NO: 425
  Description of Artificial Sequence: Synthetic Light chain variable region nucleic acid sequence

SEQ ID NO: 1594 - protein, 109 aa, Artificial Sequence; identical to SEQ ID NO: 426
  Description of Artificial Sequence: Synthetic Light chain variable region amino acid sequence

SEQ ID NO: 1595 - protein, 14 aa, Artificial Sequence
  Description of Artificial Sequence: Synthetic Light chain variable region CDR L1 amino acid sequence
GSSTGAVTTSNYAN

SEQ ID NO: 1596 - DNA, 42 bp, Artificial Sequence; identical to SEQ ID NO: 204
  Description of Artificial Sequence: Synthetic Light chain variable region CDR L1 nucleic acid sequence

SEQ ID NO: 1597 - protein, 7 aa, Artificial Sequence
  Description of Artificial Sequence: Synthetic Light chain variable region CDR L2 amino acid sequence
GTDKRAP

SEQ ID NO: 1598 - DNA, 21 bp, Artificial Sequence
  Description of Artificial Sequence: Synthetic Light chain variable region CDR L2 nucleic acid sequence
ggcacagacaagcgcgctcct

SEQ ID NO: 1599 - protein, 9 aa, Artificial Sequence
  Description of Artificial Sequence: Synthetic Light chain variable region CDR L3 amino acid sequence
ALWYSDLWV

SEQ ID NO: 1600 - DNA, 27 bp, Artificial Sequence
  Description of Artificial Sequence: Synthetic Light chain variable region CDR L3 nucleic acid sequence
gcgctgtggtacagtgatctgtgggtg

SEQ ID NO: 1601 - DNA, 375 bp, Artificial Sequence; identical to SEQ ID NO: 1201
  Description of Artificial Sequence: Synthetic Heavy chain variable region nucleic acid sequence

SEQ ID NO: 1602 - protein, 125 aa, Artificial Sequence; identical to SEQ ID NO: 1202
  Description of Artificial Sequence: Synthetic Heavy chain variable region amino acid sequence

SEQ ID NO: 1603 - protein, 9 aa, Artificial Sequence
  Description of Artificial Sequence: Synthetic Heavy chain variable region CDR H1 amino acid sequence
FTFDTYAMN

SEQ ID NO: 1604 - DNA, 27 bp, Artificial Sequence
  Description of Artificial Sequence: Synthetic Heavy chain variable region CDR H1 nucleic acid sequence
ttcacctttgacacatatgccatgaac

SEQ ID NO: 1605 - protein, 19 aa, Artificial Sequence
  Description of Artificial Sequence: Synthetic Heavy chain variable region CDR H2 amino acid sequence
RIRSKYNDYATYYADSVKD

SEQ ID NO: 1606 - DNA, 57 bp, Artificial Sequence; identical to SEQ ID NO: 422
  Description of Artificial Sequence: Synthetic Heavy chain variable region CDR H2 nucleic acid sequence

SEQ ID NO: 1607 - protein, 16 aa, Artificial Sequence
  Description of Artificial Sequence: Synthetic Heavy chain variable region CDR H3 amino acid sequence
VRHGNFGGAYVSWFAH

SEQ ID NO: 1608 - DNA, 48 bp, Artificial Sequence; identical to SEQ ID NO: 1208
  Description of Artificial Sequence: Synthetic Heavy chain variable region CDR H3 nucleic acid sequence

SEQ ID NO: 1609 - DNA, 327 bp, Artificial Sequence; identical to SEQ ID NO: 425
  Description of Artificial Sequence: Synthetic Light chain variable region nucleic acid sequence

SEQ ID NO: 1610 - protein, 109 aa, Artificial Sequence; identical to SEQ ID NO: 426
  Description of Artificial Sequence: Synthetic Light chain variable region amino acid sequence

SEQ ID NO: 1611 - protein, 14 aa, Artificial Sequence
  Description of Artificial Sequence: Synthetic Light chain variable region CDR L1 amino acid sequence
GSSTGAVTTSNYAN

SEQ ID NO: 1612 - DNA, 42 bp, Artificial Sequence; identical to SEQ ID NO: 204
  Description of Artificial Sequence: Synthetic Light chain variable region CDR L1 nucleic acid sequence

SEQ ID NO: 1613 - protein, 7 aa, Artificial Sequence
  Description of Artificial Sequence: Synthetic Light chain variable region CDR L2 amino acid sequence
GTDKRAP

SEQ ID NO: 1614 - DNA, 21 bp, Artificial Sequence
  Description of Artificial Sequence: Synthetic Light chain variable region CDR L2 nucleic acid sequence
ggcacagacaagcgcgctcct

SEQ ID NO: 1615 - protein, 9 aa, Artificial Sequence
  Description of Artificial Sequence: Synthetic Light chain variable region CDR L3 amino acid sequence
ALWYSDLWV

SEQ ID NO: 1616 - DNA, 27 bp, Artificial Sequence
  Description of Artificial Sequence: Synthetic Light chain variable region CDR L3 nucleic acid sequence
gcgctgtggtacagtgatctgtgggtg

SEQ ID NO: 1617 - DNA, 375 bp, Artificial Sequence; identical to SEQ ID NO: 1217
  Description of Artificial Sequence: Synthetic Heavy chain variable region nucleic acid sequence

SEQ ID NO: 1618 - protein, 125 aa, Artificial Sequence; identical to SEQ ID NO: 1218
  Description of Artificial Sequence: Synthetic Heavy chain variable region amino acid sequence

SEQ ID NO: 1619 - protein, 9 aa, Artificial Sequence
  Description of Artificial Sequence: Synthetic Heavy chain variable region CDR H1 amino acid sequence
FTFDAYAMN

SEQ ID NO: 1620 - DNA, 27 bp, Artificial Sequence
  Description of Artificial Sequence: Synthetic Heavy chain variable region CDR H1 nucleic acid sequence
ttcacctttgacgcttatgccatgaac

SEQ ID NO: 1621 - protein, 19 aa, Artificial Sequence
  Description of Artificial Sequence: Synthetic Heavy chain variable region CDR H2 amino acid sequence
RIRSKYNDYATYYADSVKD

SEQ ID NO: 1622 - DNA, 57 bp, Artificial Sequence; identical to SEQ ID NO: 422
  Description of Artificial Sequence: Synthetic Heavy chain variable region CDR H2 nucleic acid sequence

SEQ ID NO: 1623 - protein, 16 aa, Artificial Sequence
  Description of Artificial Sequence: Synthetic Heavy chain variable region CDR H3 amino acid sequence
VRHGNFGGGYVSWFGH

SEQ ID NO: 1624 - DNA, 48 bp, Artificial Sequence; identical to SEQ ID NO: 1224
  Description of Artificial Sequence: Synthetic Heavy chain variable region CDR H3 nucleic acid sequence

SEQ ID NO: 1625 - DNA, 327 bp, Artificial Sequence; identical to SEQ ID NO: 425
  Description of Artificial Sequence: Synthetic Light chain variable region nucleic acid sequence

SEQ ID NO: 1626 - protein, 109 aa, Artificial Sequence; identical to SEQ ID NO: 426
  Description of Artificial Sequence: Synthetic Light chain variable region amino acid sequence

SEQ ID NO: 1627 - protein, 14 aa, Artificial Sequence
  Description of Artificial Sequence: Synthetic Light chain variable region CDR L1 amino acid sequence
GSSTGAVTTSNYAN

SEQ ID NO: 1628 - DNA, 42 bp, Artificial Sequence; identical to SEQ ID NO: 204
  Description of Artificial Sequence: Synthetic Light chain variable region CDR L1 nucleic acid sequence

SEQ ID NO: 1629 - protein, 7 aa, Artificial Sequence
  Description of Artificial Sequence: Synthetic Light chain variable region CDR L2 amino acid sequence
GTDKRAP

SEQ ID NO: 1630 - DNA, 21 bp, Artificial Sequence
  Description of Artificial Sequence: Synthetic Light chain variable region CDR L2 nucleic acid sequence
ggcacagacaagcgcgctcct

SEQ ID NO: 1631 - protein, 9 aa, Artificial Sequence
  Description of Artificial Sequence: Synthetic Light chain variable region CDR L3 amino acid sequence
ALWYSDLWV

SEQ ID NO: 1632 - DNA, 27 bp, Artificial Sequence
  Description of Artificial Sequence: Synthetic Light chain variable region CDR L3 nucleic acid sequence
gcgctgtggtacagtgatctgtgggtg

SEQ ID NO: 1633 - DNA, 375 bp, Artificial Sequence; identical to SEQ ID NO: 1409
  Description of Artificial Sequence: Synthetic Heavy chain variable region nucleic acid sequence

SEQ ID NO: 1634 - protein, 125 aa, Artificial Sequence; identical to SEQ ID NO: 1410
  Description of Artificial Sequence: Synthetic Heavy chain variable region amino acid sequence

SEQ ID NO: 1635 - protein, 9 aa, Artificial Sequence
  Description of Artificial Sequence: Synthetic Heavy chain variable region CDR H1 amino acid sequence
FTFDAYAMN

SEQ ID NO: 1636 - DNA, 27 bp, Artificial Sequence
  Description of Artificial Sequence: Synthetic Heavy chain variable region CDR H1 nucleic acid sequence
ttcacctttgacgcttatgccatgaac

SEQ ID NO: 1637 - protein, 19 aa, Artificial Sequence
  Description of Artificial Sequence: Synthetic Heavy chain variable region CDR H2 amino acid sequence
RIRSKYNDYATYYADSVKD

SEQ ID NO: 1638 - DNA, 57 bp, Artificial Sequence; identical to SEQ ID NO: 422
  Description of Artificial Sequence: Synthetic Heavy chain variable region CDR H2 nucleic acid sequence

SEQ ID NO: 1639 - protein, 16 aa, Artificial Sequence
  Description of Artificial Sequence: Synthetic Heavy chain variable region CDR H3 amino acid sequence
VRHGNVGGGYVSWFAH

SEQ ID NO: 1640 - DNA, 48 bp, Artificial Sequence; identical to SEQ ID NO: 1416
  Description of Artificial Sequence: Synthetic Heavy chain variable region CDR H3 nucleic acid sequence

SEQ ID NO: 1641 - DNA, 327 bp, Artificial Sequence; identical to SEQ ID NO: 425
  Description of Artificial Sequence: Synthetic Light chain variable region nucleic acid sequence

SEQ ID NO: 1642 - protein, 109 aa, Artificial Sequence; identical to SEQ ID NO: 426
  Description of Artificial Sequence: Synthetic Light chain variable region amino acid sequence

SEQ ID NO: 1643 - protein, 14 aa, Artificial Sequence
  Description of Artificial Sequence: Synthetic Light chain variable region CDR L1 amino acid sequence
GSSTGAVTTSNYAN

SEQ ID NO: 1644 - DNA, 42 bp, Artificial Sequence; identical to SEQ ID NO: 204
  Description of Artificial Sequence: Synthetic Light chain variable region CDR L1 nucleic acid sequence

SEQ ID NO: 1645 - protein, 7 aa, Artificial Sequence
  Description of Artificial Sequence: Synthetic Light chain variable region CDR L2 amino acid sequence
GTDKRAP

SEQ ID NO: 1646 - DNA, 21 bp, Artificial Sequence
  Description of Artificial Sequence: Synthetic Light chain variable region CDR L2 nucleic acid sequence
ggcacagacaagcgcgctcct

SEQ ID NO: 1647 - protein, 9 aa, Artificial Sequence
  Description of Artificial Sequence: Synthetic Light chain variable region CDR L3 amino acid sequence
ALWYSDLWV

SEQ ID NO: 1648 - DNA, 27 bp, Artificial Sequence
  Description of Artificial Sequence: Synthetic Light chain variable region CDR L3 nucleic acid sequence
gcgctgtggtacagtgatctgtgggtg

SEQ ID NO: 1649 - DNA, 375 bp, Artificial Sequence; identical to SEQ ID NO: 1233
  Description of Artificial Sequence: Synthetic Heavy chain variable region nucleic acid sequence

SEQ ID NO: 1650 - protein, 125 aa, Artificial Sequence; identical to SEQ ID NO: 1234
  Description of Artificial Sequence: Synthetic Heavy chain variable region amino acid sequence

SEQ ID NO: 1651 - protein, 9 aa, Artificial Sequence
  Description of Artificial Sequence: Synthetic Heavy chain variable region CDR H1 amino acid sequence
FTFDAYAMN

SEQ ID NO: 1652 - DNA, 27 bp, Artificial Sequence
  Description of Artificial Sequence: Synthetic Heavy chain variable region CDR H1 nucleic acid sequence
ttcacctttgacgcttatgccatgaac

SEQ ID NO: 1653 - protein, 19 aa, Artificial Sequence
  Description of Artificial Sequence: Synthetic Heavy chain variable region CDR H2 amino acid sequence
RIRSKYNDYATYYADSVKD

SEQ ID NO: 1654 - DNA, 57 bp, Artificial Sequence; identical to SEQ ID NO: 422
  Description of Artificial Sequence: Synthetic Heavy chain variable region CDR H2 nucleic acid sequence

SEQ ID NO: 1655 - protein, 16 aa, Artificial Sequence
  Description of Artificial Sequence: Synthetic Heavy chain variable region CDR H3 amino acid sequence
VRHGNFGNYAVSWFAH

SEQ ID NO: 1656 - DNA, 48 bp, Artificial Sequence; identical to SEQ ID NO: 1240
  Description of Artificial Sequence: Synthetic Heavy chain variable region CDR H3 nucleic acid sequence

SEQ ID NO: 1657 - DNA, 327 bp, Artificial Sequence; identical to SEQ ID NO: 425
  Description of Artificial Sequence: Synthetic Light chain variable region nucleic acid sequence

SEQ ID NO: 1658 - protein, 109 aa, Artificial Sequence; identical to SEQ ID NO: 426
  Description of Artificial Sequence: Synthetic Light chain variable region amino acid sequence

SEQ ID NO: 1659 - protein, 14 aa, Artificial Sequence
  Description of Artificial Sequence: Synthetic Light chain variable region CDR L1 amino acid sequence
GSSTGAVTTSNYAN

SEQ ID NO: 1660 - DNA, 42 bp, Artificial Sequence; identical to SEQ ID NO: 204
  Description of Artificial Sequence: Synthetic Light chain variable region CDR L1 nucleic acid sequence

SEQ ID NO: 1661 - protein, 7 aa, Artificial Sequence
  Description of Artificial Sequence: Synthetic Light chain variable region CDR L2 amino acid sequence
GTDKRAP

SEQ ID NO: 1662 - DNA, 21 bp, Artificial Sequence
  Description of Artificial Sequence: Synthetic Light chain variable region CDR L2 nucleic acid sequence
ggcacagacaagcgcgctcct

SEQ ID NO: 1663 - protein, 9 aa, Artificial Sequence
  Description of Artificial Sequence: Synthetic Light chain variable region CDR L3 amino acid sequence
ALWYSDLWV

SEQ ID NO: 1664 - DNA, 27 bp, Artificial Sequence
  Description of Artificial Sequence: Synthetic Light chain variable region CDR L3 nucleic acid sequence
gcgctgtggtacagtgatctgtgggtg

SEQ ID NO: 1665 - DNA, 375 bp, Artificial Sequence; identical to SEQ ID NO: 17
  Description of Artificial Sequence: Synthetic Heavy chain variable region nucleic acid sequence

SEQ ID NO: 1666 - protein, 125 aa, Artificial Sequence; identical to SEQ ID NO: 18
  Description of Artificial Sequence: Synthetic Heavy chain variable region amino acid sequence

SEQ ID NO: 1667 - protein, 9 aa, Artificial Sequence
  Description of Artificial Sequence: Synthetic Heavy chain variable region CDR H1 amino acid sequence
FTFDTYAMN

SEQ ID NO: 1668 - DNA, 27 bp, Artificial Sequence
  Description of Artificial Sequence: Synthetic Heavy chain variable region CDR H1 nucleic acid sequence
ttcacctttgacacatatgccatgaat

SEQ ID NO: 1669 - protein, 19 aa, Artificial Sequence
  Description of Artificial Sequence: Synthetic Heavy chain variable region CDR H2 amino acid sequence
RIRSKYNNYATYYADSVKD

SEQ ID NO: 1670 - DNA, 57 bp, Artificial Sequence; identical to SEQ ID NO: 6
  Description of Artificial Sequence: Synthetic Heavy chain variable region CDR H2 nucleic acid sequence

SEQ ID NO: 1671 - protein, 16 aa, Artificial Sequence
  Description of Artificial Sequence: Synthetic Heavy chain variable region CDR H3 amino acid sequence
VRHGNFGNGYVSWFAH

SEQ ID NO: 1672 - DNA, 48 bp, Artificial Sequence; identical to SEQ ID NO: 24
  Description of Artificial Sequence: Synthetic Heavy chain variable region CDR H3 nucleic acid sequence

SEQ ID NO: 1673 - DNA, 327 bp, Artificial Sequence
  Description of Artificial Sequence: Synthetic Light chain variable region nucleic acid sequence
cagactgtggtgacccaggagccatcgctctcagtgtcccctggagggacagtcacactcacttgtggatcaagcactggcgcagtcactactagtaactacgccaactgggtccagcagaccccaggccaggctccgcgcggactcatcggcggcacagacaagcgcgctcctggggtccctgatcgcttctctggctccctgcttggggacaaagctgccctcatcatcacgggggcccaggcagatgatgaagctgattattactgtgcgctgtggtacagtaacctttgggtgttcggcggagggaccaagctgaccgtccta

SEQ ID NO: 1674 - protein, 109 aa, Artificial Sequence
  Description of Artificial Sequence: Synthetic Light chain variable region amino acid sequence
QTVVTQEPSLSVSPGGTVTLTCGSSTGAVTTSNYANWVQQTPGQAPRGLIGGTDKRAPGVPDRFSGSLLGDKAALIITGAQADDEADYYCALWYSNLWVFGGGTKLTVL

SEQ ID NO: 1675 - protein, 14 aa, Artificial Sequence
  Description of Artificial Sequence: Synthetic Light chain variable region CDR L1 amino acid sequence
GSSTGAVTTSNYAN

SEQ ID NO: 1676 - DNA, 42 bp, Artificial Sequence; identical to SEQ ID NO: 204
  Description of Artificial Sequence: Synthetic Light chain variable region CDR L1 nucleic acid sequence

SEQ ID NO: 1677 - protein, 7 aa, Artificial Sequence
  Description of Artificial Sequence: Synthetic Light chain variable region CDR L2 amino acid sequence
GTDKRAP

SEQ ID NO: 1678 - DNA, 21 bp, Artificial Sequence
  Description of Artificial Sequence: Synthetic Light chain variable region CDR L2 nucleic acid sequence
ggcacagacaagcgcgctcct

SEQ ID NO: 1679 - protein, 9 aa, Artificial Sequence
  Description of Artificial Sequence: Synthetic Light chain variable region CDR L3 amino acid sequence
ALWYSNLWV

SEQ ID NO: 1680 - DNA, 27 bp, Artificial Sequence
  Description of Artificial Sequence: Synthetic Light chain variable region CDR L3 nucleic acid sequence
gcgctgtggtacagtaacctttgggtg

SEQ ID NO: 1681 - DNA, 375 bp, Artificial Sequence; identical to SEQ ID NO: 17
  Description of Artificial Sequence: Synthetic Heavy chain variable region nucleic acid sequence

SEQ ID NO: 1682 - protein, 125 aa, Artificial Sequence; identical to SEQ ID NO: 18
  Description of Artificial Sequence: Synthetic Heavy chain variable region amino acid sequence

SEQ ID NO: 1683 - protein, 9 aa, Artificial Sequence
  Description of Artificial Sequence: Synthetic Heavy chain variable region CDR H1 amino acid sequence
FTFDTYAMN

SEQ ID NO: 1684 - DNA, 27 bp, Artificial Sequence
  Description of Artificial Sequence: Synthetic Heavy chain variable region CDR H1 nucleic acid sequence
ttcacctttgacacatatgccatgaat

SEQ ID NO: 1685 - protein, 19 aa, Artificial Sequence
  Description of Artificial Sequence: Synthetic Heavy chain variable region CDR H2 amino acid sequence
RIRSKYNNYATYYADSVKD

SEQ ID NO: 1686 - DNA, 57 bp, Artificial Sequence; identical to SEQ ID NO: 6
  Description of Artificial Sequence: Synthetic Heavy chain variable region CDR H2 nucleic acid sequence

SEQ ID NO: 1687 - protein, 16 aa, Artificial Sequence
  Description of Artificial Sequence: Synthetic Heavy chain variable region CDR H3 amino acid sequence
VRHGNFGNGYVSWFAH

SEQ ID NO: 1688 - DNA, 48 bp, Artificial Sequence; identical to SEQ ID NO: 24
  Description of Artificial Sequence: Synthetic Heavy chain variable region CDR H3 nucleic acid sequence

SEQ ID NO: 1689 - DNA, 327 bp, Artificial Sequence
  Description of Artificial Sequence: Synthetic Light chain variable region nucleic acid sequence
cagactgtggtgacccaggagccatcgctctcagtgtcccctggagggacagtcacactcacttgtggatcaagcactggcgcagtcactactagtaactacgccaactgggtccagcagaccccaggccaggctccgcgcggactcatcggcggcacagacaagcgcgctcctggggtccctgatcgcttctctggctccctgcttggggacaaagctgccctcatcatcacgggggcccaggcagaggatgaagctgattattactgtgcgctgtggtacagtaacctttgggtgttcggcggagggaccaagctgaccgtccta

SEQ ID NO: 1690 - protein, 109 aa, Artificial Sequence
  Description of Artificial Sequence: Synthetic Light chain variable region amino acid sequence
QTVVTQEPSLSVSPGGTVTLTCGSSTGAVTTSNYANWVQQTPGQAPRGLIGGTDKRAPGVPDRFSGSLLGDKAALIITGAQAEDEADYYCALWYSNLWVFGGGTKLTVL

SEQ ID NO: 1691 - protein, 14 aa, Artificial Sequence
  Description of Artificial Sequence: Synthetic Light chain variable region CDR L1 amino acid sequence
GSSTGAVTTSNYAN

SEQ ID NO: 1692 - DNA, 42 bp, Artificial Sequence; identical to SEQ ID NO: 204
  Description of Artificial Sequence: Synthetic Light chain variable region CDR L1 nucleic acid sequence

SEQ ID NO: 1693 - protein, 7 aa, Artificial Sequence
  Description of Artificial Sequence: Synthetic Light chain variable region CDR L2 amino acid sequence
GTDKRAP

SEQ ID NO: 1694 - DNA, 21 bp, Artificial Sequence
  Description of Artificial Sequence: Synthetic Light chain variable region CDR L2 nucleic acid sequence
ggcacagacaagcgcgctcct

SEQ ID NO: 1695 - protein, 9 aa, Artificial Sequence
  Description of Artificial Sequence: Synthetic Light chain variable region CDR L3 amino acid sequence
ALWYSNLWV

SEQ ID NO: 1696 - DNA, 27 bp, Artificial Sequence
  Description of Artificial Sequence: Synthetic Light chain variable region CDR L3 nucleic acid sequence
gcgctgtggtacagtaacctttgggtg

SEQ ID NO: 1697 - DNA, 375 bp, Artificial Sequence; identical to SEQ ID NO: 17
  Description of Artificial Sequence: Synthetic Heavy chain variable region nucleic acid sequence

SEQ ID NO: 1698 - protein, 125 aa, Artificial Sequence; identical to SEQ ID NO: 18
  Description of Artificial Sequence: Synthetic Heavy chain variable region amino acid sequence

SEQ ID NO: 1699 - protein, 9 aa, Artificial Sequence
  Description of Artificial Sequence: Synthetic Heavy chain variable region CDR H1 amino acid sequence
FTFDTYAMN

SEQ ID NO: 1700 - DNA, 27 bp, Artificial Sequence
  Description of Artificial Sequence: Synthetic Heavy chain variable region CDR H1 nucleic acid sequence
ttcacctttgacacatatgccatgaat

SEQ ID NO: 1701 - protein, 19 aa, Artificial Sequence
  Description of Artificial Sequence: Synthetic Heavy chain variable region CDR H2 amino acid sequence
RIRSKYNNYATYYADSVKD

SEQ ID NO: 1702 - DNA, 57 bp, Artificial Sequence; identical to SEQ ID NO: 6
  Description of Artificial Sequence: Synthetic Heavy chain variable region CDR H2 nucleic acid sequence

SEQ ID NO: 1703 - protein, 16 aa, Artificial Sequence
  Description of Artificial Sequence: Synthetic Heavy chain variable region CDR H3 amino acid sequence
VRHGNFGNGYVSWFAH

SEQ ID NO: 1704 - DNA, 48 bp, Artificial Sequence; identical to SEQ ID NO: 24
  Description of Artificial Sequence: Synthetic Heavy chain variable region CDR H3 nucleic acid sequence

SEQ ID NO: 1705 - DNA, 327 bp, Artificial Sequence
  Description of Artificial Sequence: Synthetic Light chain variable region nucleic acid sequence
cagactgtggtgacccaggagccatcgctctcagtgtcccctggagggacagtcacactcacttgtggatcaagcactggcgcagtcactactagtaactacgccaactgggtccagcagaccccaggccaggctccgcgcggactcatcggcggcacagacaagcgcgctcctggggtccctgatcgcttctctggctccctgcttggggacaaagctgccctcatcatcacgggggcccaggcagatgatgaagctgattattactgtgtgctgtggtacagtaacctttgggtgttcggcggagggaccaagctgaccgtccta

SEQ ID NO: 1706 - protein, 109 aa, Artificial Sequence
  Description of Artificial Sequence: Synthetic Light chain variable region amino acid sequence
QTVVTQEPSLSVSPGGTVTLTCGSSTGAVTTSNYANWVQQTPGQAPRGLIGGTDKRAPGVPDRFSGSLLGDKAALIITGAQADDEADYYCVLWYSNLWVFGGGTKLTVL

SEQ ID NO: 1707 - protein, 14 aa, Artificial Sequence
  Description of Artificial Sequence: Synthetic Light chain variable region CDR L1 amino acid sequence
GSSTGAVTTSNYAN

SEQ ID NO: 1708 - DNA, 42 bp, Artificial Sequence; identical to SEQ ID NO: 204
  Description of Artificial Sequence: Synthetic Light chain variable region CDR L1 nucleic acid sequence

SEQ ID NO: 1709 - protein, 7 aa, Artificial Sequence
  Description of Artificial Sequence: Synthetic Light chain variable region CDR L2 amino acid sequence
GTDKRAP

SEQ ID NO: 1710 - DNA, 21 bp, Artificial Sequence
  Description of Artificial Sequence: Synthetic Light chain variable region CDR L2 nucleic acid sequence
ggcacagacaagcgcgctcct

SEQ ID NO: 1711 - protein, 9 aa, Artificial Sequence
  Description of Artificial Sequence: Synthetic Light chain variable region CDR L3 amino acid sequence
VLWYSNLWV

SEQ ID NO: 1712 - DNA, 27 bp, Artificial Sequence
  Description of Artificial Sequence: Synthetic Light chain variable region CDR L3 nucleic acid sequence
gtgctgtggtacagtaacctttgggtg

SEQ ID NO: 1713 - DNA, 375 bp, Artificial Sequence; identical to SEQ ID NO: 17
  Description of Artificial Sequence: Synthetic Heavy chain variable region nucleic acid sequence

SEQ ID NO: 1714 - protein, 125 aa, Artificial Sequence; identical to SEQ ID NO: 18
  Description of Artificial Sequence: Synthetic Heavy chain variable region amino acid sequence

SEQ ID NO: 1715 - protein, 9 aa, Artificial Sequence
  Description of Artificial Sequence: Synthetic Heavy chain variable region CDR H1 amino acid sequence
FTFDTYAMN

SEQ ID NO: 1716 - DNA, 27 bp, Artificial Sequence
  Description of Artificial Sequence: Synthetic Heavy chain variable region CDR H1 nucleic acid sequence
ttcacctttgacacatatgccatgaat

SEQ ID NO: 1717 - protein, 19 aa, Artificial Sequence
  Description of Artificial Sequence: Synthetic Heavy chain variable region CDR H2 amino acid sequence
RIRSKYNNYATYYADSVKD

SEQ ID NO: 1718 - DNA, 57 bp, Artificial Sequence; identical to SEQ ID NO: 6
  Description of Artificial Sequence: Synthetic Heavy chain variable region CDR H2 nucleic acid sequence

SEQ ID NO: 1719 - protein, 16 aa, Artificial Sequence
  Description of Artificial Sequence: Synthetic Heavy chain variable region CDR H3 amino acid sequence
VRHGNFGNGYVSWFAH

SEQ ID NO: 1720 - DNA, 48 bp, Artificial Sequence; identical to SEQ ID NO: 24
  Description of Artificial Sequence: Synthetic Heavy chain variable region CDR H3 nucleic acid sequence

SEQ ID NO: 1721 - DNA, 327 bp, Artificial Sequence
  Description of Artificial Sequence: Synthetic Light chain variable region nucleic acid sequence
cagactgtggtgacccaggagccatcgctctcagtgtcccctggagggacagtcacactcacttgtggatcaagcactggcgcagtcactactagtaactacgccaactgggtccagcagaccccaggccaggctccgcgcggactcatcggcggcacagacaagcgcgctcctggggtccctgatcgcttctctggctccctgcttggggacaaagctgccctcaccatcacgggggtccaggcagatgatgaagctgattattactgtgcgctgtggtacagtaacctttgggtgttcggcggagggaccaagctgaccgtccta

SEQ ID NO: 1722 - protein, 109 aa, Artificial Sequence
  Description of Artificial Sequence: Synthetic Light chain variable region amino acid sequence
QTVVTQEPSLSVSPGGTVTLTCGSSTGAVTTSNYANWVQQTPGQAPRGLIGGTDKRAPGVPDRFSGSLLGDKAALTITGVQADDEADYYCALWYSNLWVFGGGTKLTVL

SEQ ID NO: 1723 - protein, 14 aa, Artificial Sequence
  Description of Artificial Sequence: Synthetic Light chain variable region CDR L1 amino acid sequence
GSSTGAVTTSNYAN

SEQ ID NO: 1724 - DNA, 42 bp, Artificial Sequence; identical to SEQ ID NO: 204
  Description of Artificial Sequence: Synthetic Light chain variable region CDR L1 nucleic acid sequence

SEQ ID NO: 1725 - protein, 7 aa, Artificial Sequence
  Description of Artificial Sequence: Synthetic Light chain variable region CDR L2 amino acid sequence
GTDKRAP

SEQ ID NO: 1726 - DNA, 21 bp, Artificial Sequence
  Description of Artificial Sequence: Synthetic Light chain variable region CDR L2 nucleic acid sequence
ggcacagacaagcgcgctcct

SEQ ID NO: 1727 - protein, 9 aa, Artificial Sequence
  Description of Artificial Sequence: Synthetic Light chain variable region CDR L3 amino acid sequence
ALWYSNLWV

SEQ ID NO: 1728 - DNA, 27 bp, Artificial Sequence
  Description of Artificial Sequence: Synthetic Light chain variable region CDR L3 nucleic acid sequence
gcgctgtggtacagtaacctttgggtg

SEQ ID NO: 1729 - DNA, 375 bp, Artificial Sequence; identical to SEQ ID NO: 17
  Description of Artificial Sequence: Synthetic Heavy chain variable region nucleic acid sequence

SEQ ID NO: 1730 - protein, 125 aa, Artificial Sequence; identical to SEQ ID NO: 18
  Description of Artificial Sequence: Synthetic Heavy chain variable region amino acid sequence

SEQ ID NO: 1731 - protein, 9 aa, Artificial Sequence
  Description of Artificial Sequence: Synthetic Heavy chain variable region CDR H1 amino acid sequence
FTFDTYAMN

SEQ ID NO: 1732 - DNA, 27 bp, Artificial Sequence
  Description of Artificial Sequence: Synthetic Heavy chain variable region CDR H1 nucleic acid sequence
ttcacctttgacacatatgccatgaat

SEQ ID NO: 1733 - protein, 19 aa, Artificial Sequence
  Description of Artificial Sequence: Synthetic Heavy chain variable region CDR H2 amino acid sequence
RIRSKYNNYATYYADSVKD

SEQ ID NO: 1734 - DNA, 57 bp, Artificial Sequence; identical to SEQ ID NO: 6
  Description of Artificial Sequence: Synthetic Heavy chain variable region CDR H2 nucleic acid sequence

SEQ ID NO: 1735 - protein, 16 aa, Artificial Sequence
  Description of Artificial Sequence: Synthetic Heavy chain variable region CDR H3 amino acid sequence
VRHGNFGNGYVSWFAH

SEQ ID NO: 1736 - DNA, 48 bp, Artificial Sequence; identical to SEQ ID NO: 24
  Description of Artificial Sequence: Synthetic Heavy chain variable region CDR H3 nucleic acid sequence

SEQ ID NO: 1737 - DNA, 327 bp, Artificial Sequence
  Description of Artificial Sequence: Synthetic Light chain variable region nucleic acid sequence
cagactgtggtgacccaggagccatcgctctcagtgtcccctggagggacagtcacactcacttgtggatcaagcgctggcgcagtcactactagtaactacgccaactgggtccagcagaccccaggccaggctccacgcggactcatcggcggcacagacaagcgcgctcctggggtccctgatcgcttctctggctccctgcttggggacaaagctgccctcaccatcacgggggtccaggcagatgatgaagctgattattactgtgcgctgtggtacagtaacctttgggtgttcggcggagggaccaagctgaccgtccta

SEQ ID NO: 1738 - protein, 109 aa, Artificial Sequence
  Description of Artificial Sequence: Synthetic Light chain variable region amino acid sequence
QTVVTQEPSLSVSPGGTVTLTCGSSAGAVTTSNYANWVQQTPGQAPRGLIGGTDKRAPGVPDRFSGSLLGDKAALTITGVQADDEADYYCALWYSNLWVFGGGTKLTVL

SEQ ID NO: 1739 - protein, 14 aa, Artificial Sequence
  Description of Artificial Sequence: Synthetic Light chain variable region CDR L1 amino acid sequence
GSSAGAVTTSNYAN

SEQ ID NO: 1740 - DNA, 42 bp, Artificial Sequence; identical to SEQ ID NO: 236
  Description of Artificial Sequence: Synthetic Light chain variable region CDR L1 nucleic acid sequence

SEQ ID NO: 1741 - protein, 7 aa, Artificial Sequence
  Description of Artificial Sequence: Synthetic Light chain variable region CDR L2 amino acid sequence
GTDKRAP

SEQ ID NO: 1742 - DNA, 21 bp, Artificial Sequence
  Description of Artificial Sequence: Synthetic Light chain variable region CDR L2 nucleic acid sequence
ggcacagacaagcgcgctcct

SEQ ID NO: 1743 - protein, 9 aa, Artificial Sequence
  Description of Artificial Sequence: Synthetic Light chain variable region CDR L3 amino acid sequence
ALWYSNLWV

SEQ ID NO: 1744 - DNA, 27 bp, Artificial Sequence
  Description of Artificial Sequence: Synthetic Light chain variable region CDR L3 nucleic acid sequence
gcgctgtggtacagtaacctttgggtg

SEQ ID NO: 1745 - DNA, 375 bp, Artificial Sequence; identical to SEQ ID NO: 17
  Description of Artificial Sequence: Synthetic Heavy chain variable region nucleic acid sequence

SEQ ID NO: 1746 - protein, 125 aa, Artificial Sequence; identical to SEQ ID NO: 18
  Description of Artificial Sequence: Synthetic Heavy chain variable region amino acid sequence

SEQ ID NO: 1747 - protein, 9 aa, Artificial Sequence
  Description of Artificial Sequence: Synthetic Heavy chain variable region CDR H1 amino acid sequence
FTFDTYAMN

SEQ ID NO: 1748 - DNA, 27 bp, Artificial Sequence
  Description of Artificial Sequence: Synthetic Heavy chain variable region CDR H1 nucleic acid sequence
ttcacctttgacacatatgccatgaat

SEQ ID NO: 1749 - protein, 19 aa, Artificial Sequence
  Description of Artificial Sequence: Synthetic Heavy chain variable region CDR H2 amino acid sequence
RIRSKYNNYATYYADSVKD

SEQ ID NO: 1750 - DNA, 57 bp, Artificial Sequence; identical to SEQ ID NO: 6
  Description of Artificial Sequence: Synthetic Heavy chain variable region CDR H2 nucleic acid sequence

SEQ ID NO: 1751 - protein, 16 aa, Artificial Sequence
  Description of Artificial Sequence: Synthetic Heavy chain variable region CDR H3 amino acid sequence
VRHGNFGNGYVSWFAH

SEQ ID NO: 1752 - DNA, 48 bp, Artificial Sequence; identical to SEQ ID NO: 24
  Description of Artificial Sequence: Synthetic Heavy chain variable region CDR H3 nucleic acid sequence

SEQ ID NO: 1753 - DNA, 327 bp, Artificial Sequence
  Description of Artificial Sequence: Synthetic Light chain variable region nucleic acid sequence
cagactgtggtgacccaggagccatcgctctcagtgtcccctggagggacagtcacactcacttgtggatcaagcactggcgcagtcactactagtaactacgccaactgggtccagcagaccccaggccaggctccgcgcggactcatcggcggcacagacaagcgcgctcctggggtccctgatcgcttctctggctccctgcttggggacaaagctgccctcaccatcacgggggtccaggcagaggatgaagctgattattactgtgcgctgtggtacagtaacctttgggtgttcggcggagggaccaagctgaccgtccta

SEQ ID NO: 1754 - protein, 109 aa, Artificial Sequence
  Description of Artificial Sequence: Synthetic Light chain variable region amino acid sequence
QTVVTQEPSLSVSPGGTVTLTCGSSTGAVTTSNYANWVQQTPGQAPRGLIGGTDKRAPGVPDRFSGSLLGDKAALTITGVQAEDEADYYCALWYSNLWVFGGGTKLTVL

SEQ ID NO: 1755 - protein, 14 aa, Artificial Sequence
  Description of Artificial Sequence: Synthetic Light chain variable region CDR L1 amino acid sequence
GSSTGAVTTSNYAN

SEQ ID NO: 1756 - DNA, 42 bp, Artificial Sequence; identical to SEQ ID NO: 204
  Description of Artificial Sequence: Synthetic Light chain variable region CDR L1 nucleic acid sequence

SEQ ID NO: 1757 - protein, 7 aa, Artificial Sequence
  Description of Artificial Sequence: Synthetic Light chain variable region CDR L2 amino acid sequence
GTDKRAP

SEQ ID NO: 1758 - DNA, 21 bp, Artificial Sequence
  Description of Artificial Sequence: Synthetic Light chain variable region CDR L2 nucleic acid sequence
ggcacagacaagcgcgctcct

SEQ ID NO: 1759 - protein, 9 aa, Artificial Sequence
  Description of Artificial Sequence: Synthetic Light chain variable region CDR L3 amino acid sequence
ALWYSNLWV

SEQ ID NO: 1760 - DNA, 27 bp, Artificial Sequence
  Description of Artificial Sequence: Synthetic Light chain variable region CDR L3 nucleic acid sequence
gcgctgtggtacagtaacctttgggtg

SEQ ID NO: 1761 - DNA, 375 bp, Artificial Sequence; identical to SEQ ID NO: 17
  Description of Artificial Sequence: Synthetic Heavy chain variable region nucleic acid sequence

SEQ ID NO: 1762 - protein, 125 aa, Artificial Sequence; identical to SEQ ID NO: 18
  Description of Artificial Sequence: Synthetic Heavy chain variable region amino acid sequence

SEQ ID NO: 1763 - protein, 9 aa, Artificial Sequence
  Description of Artificial Sequence: Synthetic Heavy chain variable region CDR H1 amino acid sequence
FTFDTYAMN

SEQ ID NO: 1764 - DNA, 27 bp, Artificial Sequence
  Description of Artificial Sequence: Synthetic Heavy chain variable region CDR H1 nucleic acid sequence
ttcacctttgacacatatgccatgaat

SEQ ID NO: 1765 - protein, 19 aa, Artificial Sequence
  Description of Artificial Sequence: Synthetic Heavy chain variable region CDR H2 amino acid sequence
RIRSKYNNYATYYADSVKD

SEQ ID NO: 1766 - DNA, 57 bp, Artificial Sequence; identical to SEQ ID NO: 6
  Description of Artificial Sequence: Synthetic Heavy chain variable region CDR H2 nucleic acid sequence

SEQ ID NO: 1767 - protein, 16 aa, Artificial Sequence
  Description of Artificial Sequence: Synthetic Heavy chain variable region CDR H3 amino acid sequence
VRHGNFGNGYVSWFAH

SEQ ID NO: 1768 - DNA, 48 bp, Artificial Sequence; identical to SEQ ID NO: 24
  Description of Artificial Sequence: Synthetic Heavy chain variable region CDR H3 nucleic acid sequence

SEQ ID NO: 1769 - DNA, 327 bp, Artificial Sequence
  Description of Artificial Sequence: Synthetic Light chain variable region nucleic acid sequence
cagactgtggtgacccaggagccatcgctctcagtgtcccctggagggacagtcacactcacttgtggatcaagcactggcgcagtcactactagtaactacgccaactgggtccagcagaccccaggccaggctccgcgcggactcatcggcggcacagacaagcgcgctcctggggtccctgatcgcttctctggctccctgcttggggacaaagctgccctcaccatcacgggggtccaggcagatgatgaagctgattattactgtgcgctgtggtacaataacctttgggtgttcggcggagggaccaagctgaccgtccta

SEQ ID NO: 1770 - protein, 109 aa, Artificial Sequence
  Description of Artificial Sequence: Synthetic Light chain variable region amino acid sequence
QTVVTQEPSLSVSPGGTVTLTCGSSTGAVTTSNYANWVQQTPGQAPRGLIGGTDKRAPGVPDRFSGSLLGDKAALTITGVQADDEADYYCALWYNNLWVFGGGTKLTVL

SEQ ID NO: 1771 - protein, 14 aa, Artificial Sequence
  Description of Artificial Sequence: Synthetic Light chain variable region CDR L1 amino acid sequence
GSSTGAVTTSNYAN

SEQ ID NO: 1772 - DNA, 42 bp, Artificial Sequence; identical to SEQ ID NO: 204
  Description of Artificial Sequence: Synthetic Light chain variable region CDR L1 nucleic acid sequence

SEQ ID NO: 1773 - protein, 7 aa, Artificial Sequence
  Description of Artificial Sequence: Synthetic Light chain variable region CDR L2 amino acid sequence
GTDKRAP

SEQ ID NO: 1774 - DNA, 21 bp, Artificial Sequence
  Description of Artificial Sequence: Synthetic Light chain variable region CDR L2 nucleic acid sequence
ggcacagacaagcgcgctcct

SEQ ID NO: 1775 - protein, 9 aa, Artificial Sequence
  Description of Artificial Sequence: Synthetic Light chain variable region CDR L3 amino acid sequence
ALWYNNLWV

SEQ ID NO: 1776 - DNA, 27 bp, Artificial Sequence
  Description of Artificial Sequence: Synthetic Light chain variable region CDR L3 nucleic acid sequence
gcgctgtggtacaataacctttgggtg

SEQ ID NO: 1777 - DNA, 375 bp, Artificial Sequence; identical to SEQ ID NO: 17
  Description of Artificial Sequence: Synthetic Heavy chain variable region nucleic acid sequence

SEQ ID NO: 1778 - protein, 125 aa, Artificial Sequence; identical to SEQ ID NO: 18
  Description of Artificial Sequence: Synthetic Heavy chain variable region amino acid sequence

SEQ ID NO: 1779 - protein, 9 aa, Artificial Sequence
  Description of Artificial Sequence: Synthetic Heavy chain variable region CDR H1 amino acid sequence
FTFDTYAMN

SEQ ID NO: 1780 - DNA, 27 bp, Artificial Sequence
  Description of Artificial Sequence: Synthetic Heavy chain variable region CDR H1 nucleic acid sequence
ttcacctttgacacatatgccatgaat

SEQ ID NO: 1781 - protein, 19 aa, Artificial Sequence
  Description of Artificial Sequence: Synthetic Heavy chain variable region CDR H2 amino acid sequence
RIRSKYNNYATYYADSVKD

SEQ ID NO: 1782 - DNA, 57 bp, Artificial Sequence; identical to SEQ ID NO: 6
  Description of Artificial Sequence: Synthetic Heavy chain variable region CDR H2 nucleic acid sequence

SEQ ID NO: 1783 - protein, 16 aa, Artificial Sequence
  Description of Artificial Sequence: Synthetic Heavy chain variable region CDR H3 amino acid sequence
VRHGNFGNGYVSWFAH

SEQ ID NO: 1784 - DNA, 48 bp, Artificial Sequence; identical to SEQ ID NO: 24
  Description of Artificial Sequence: Synthetic Heavy chain variable region CDR H3 nucleic acid sequence

SEQ ID NO: 1785 - DNA, 327 bp, Artificial Sequence
  Description of Artificial Sequence: Synthetic Light chain variable region nucleic acid sequence
cagactgtggtgacccaggagccatcgctctcagtgtcccctggagggacagtcacactcacttgtggatcaagcactggcgcagtcactactagtaactacgccaactgggtccagcagaccccaggccaggctccgcgcggactcatcggcggcacagacaagcgcgctcctggggtccctgatcgcttctctggctccctgcttggggacaaagctgccctcaccatcacgggggtccaggcagatgatgaagctgattattactgtgtgctgtggtacagtaacctttgggtgttcggcggagggaccaagctgaccgtccta

SEQ ID NO: 1786 - protein, 109 aa, Artificial Sequence
  Description of Artificial Sequence: Synthetic Light chain variable region amino acid sequence
QTVVTQEPSLSVSPGGTVTLTCGSSTGAVTTSNYANWVQQTPGQAPRGLIGGTDKRAPGVPDRFSGSLLGDKAALTITGVQADDEADYYCVLWYSNLWVFGGGTKLTVL

SEQ ID NO: 1787 - protein, 14 aa, Artificial Sequence
  Description of Artificial Sequence: Synthetic Light chain variable region CDR L1 amino acid sequence
GSSTGAVTTSNYAN

SEQ ID NO: 1788 - DNA, 42 bp, Artificial Sequence; identical to SEQ ID NO: 204
  Description of Artificial Sequence: Synthetic Light chain variable region CDR L1 nucleic acid sequence

SEQ ID NO: 1789 - protein, 7 aa, Artificial Sequence
  Description of Artificial Sequence: Synthetic Light chain variable region CDR L2 amino acid sequence
GTDKRAP

SEQ ID NO: 1790 - DNA, 21 bp, Artificial Sequence
  Description of Artificial Sequence: Synthetic Light chain variable region CDR L2 nucleic acid sequence
ggcacagacaagcgcgctcct

SEQ ID NO: 1791 - protein, 9 aa, Artificial Sequence
  Description of Artificial Sequence: Synthetic Light chain variable region CDR L3 amino acid sequence
VLWYSNLWV

SEQ ID NO: 1792 - DNA, 27 bp, Artificial Sequence
  Description of Artificial Sequence: Synthetic Light chain variable region CDR L3 nucleic acid sequence
gtgctgtggtacagtaacctttgggtg

SEQ ID NO: 1793 - DNA, 375 bp, Artificial Sequence; identical to SEQ ID NO: 17
  Description of Artificial Sequence: Synthetic Heavy chain variable region nucleic acid sequence

SEQ ID NO: 1794 - protein, 125 aa, Artificial Sequence; identical to SEQ ID NO: 18
  Description of Artificial Sequence: Synthetic Heavy chain variable region amino acid sequence

SEQ ID NO: 1795 - protein, 9 aa, Artificial Sequence
  Description of Artificial Sequence: Synthetic Heavy chain variable region CDR H1 amino acid sequence
FTFDTYAMN

SEQ ID NO: 1796 - DNA, 27 bp, Artificial Sequence
  Description of Artificial Sequence: Synthetic Heavy chain variable region CDR H1 nucleic acid sequence
ttcacctttgacacatatgccatgaat

SEQ ID NO: 1797 - protein, 19 aa, Artificial Sequence
  Description of Artificial Sequence: Synthetic Heavy chain variable region CDR H2 amino acid sequence
RIRSKYNNYATYYADSVKD

SEQ ID NO: 1798 - DNA, 57 bp, Artificial Sequence; identical to SEQ ID NO: 6
  Description of Artificial Sequence: Synthetic Heavy chain variable region CDR H2 nucleic acid sequence

SEQ ID NO: 1799 - protein, 16 aa, Artificial Sequence
  Description of Artificial Sequence: Synthetic Heavy chain variable region CDR H3 amino acid sequence
VRHGNFGNGYVSWFAH

SEQ ID NO: 1800 - DNA, 48 bp, Artificial Sequence; identical to SEQ ID NO: 24
  Description of Artificial Sequence: Synthetic Heavy chain variable region CDR H3 nucleic acid sequence

SEQ ID NO: 1801 - DNA, 327 bp, Artificial Sequence
  Description of Artificial Sequence: Synthetic Light chain variable region nucleic acid sequence
cagactgtggtgacccaggagccatcgctctcagtgtcccctggagggacagtcacactcacttgtggatcaagcgctggcgcagtcactactagtaactacgccaactgggtccagcagaccccaggccaggctccacgcggactcatcggcggcacagacaagcgcgctcctggggtccctgatcgcttctctggctccctgcttggggacaaagctgccctcaccatcacgggggcccaggcagatgatgaagctgattattactgtgcgctgtggtacagtaacctttgggtgttcggcggagggaccaagctgaccgtccta

SEQ ID NO: 1802 - protein, 109 aa, Artificial Sequence
  Description of Artificial Sequence: Synthetic Light chain variable region amino acid sequence
QTVVTQEPSLSVSPGGTVTLTCGSSAGAVTTSNYANWVQQTPGQAPRGLIGGTDKRAPGVPDRFSGSLLGDKAALTITGAQADDEADYYCALWYSNLWVFGGGTKLTVL

SEQ ID NO: 1803 - protein, 14 aa, Artificial Sequence
  Description of Artificial Sequence: Synthetic Light chain variable region CDR L1 amino acid sequence
GSSAGAVTTSNYAN

SEQ ID NO: 1804 - DNA, 42 bp, Artificial Sequence; identical to SEQ ID NO: 236
  Description of Artificial Sequence: Synthetic Light chain variable region CDR L1 nucleic acid sequence

SEQ ID NO: 1805 - protein, 7 aa, Artificial Sequence
  Description of Artificial Sequence: Synthetic Light chain variable region CDR L2 amino acid sequence
GTDKRAP

SEQ ID NO: 1806 - DNA, 21 bp, Artificial Sequence
  Description of Artificial Sequence: Synthetic Light chain variable region CDR L2 nucleic acid sequence
ggcacagacaagcgcgctcct

SEQ ID NO: 1807 - protein, 9 aa, Artificial Sequence
  Description of Artificial Sequence: Synthetic Light chain variable region CDR L3 amino acid sequence
ALWYSNLWV

SEQ ID NO: 1808 - DNA, 27 bp, Artificial Sequence
  Description of Artificial Sequence: Synthetic Light chain variable region CDR L3 nucleic acid sequence
gcgctgtggtacagtaacctttgggtg

SEQ ID NO: 1809 - DNA, 375 bp, Artificial Sequence; identical to SEQ ID NO: 17
  Description of Artificial Sequence: Synthetic Heavy chain variable region nucleic acid sequence

SEQ ID NO: 1810 - protein, 125 aa, Artificial Sequence; identical to SEQ ID NO: 18
  Description of Artificial Sequence: Synthetic Heavy chain variable region amino acid sequence

SEQ ID NO: 1811 - protein, 9 aa, Artificial Sequence
  Description of Artificial Sequence: Synthetic Heavy chain variable region CDR H1 amino acid sequence
FTFDTYAMN

SEQ ID NO: 1812 - DNA, 27 bp, Artificial Sequence
  Description of Artificial Sequence: Synthetic Heavy chain variable region CDR H1 nucleic acid sequence
ttcacctttgacacatatgccatgaat

SEQ ID NO: 1813 - protein, 19 aa, Artificial Sequence
  Description of Artificial Sequence: Synthetic Heavy chain variable region CDR H2 amino acid sequence
RIRSKYNNYATYYADSVKD

SEQ ID NO: 1814 - DNA, 57 bp, Artificial Sequence; identical to SEQ ID NO: 6
  Description of Artificial Sequence: Synthetic Heavy chain variable region CDR H2 nucleic acid sequence

SEQ ID NO: 1815 - protein, 16 aa, Artificial Sequence
  Description of Artificial Sequence: Synthetic Heavy chain variable region CDR H3 amino acid sequence
VRHGNFGNGYVSWFAH

SEQ ID NO: 1816 - DNA, 48 bp, Artificial Sequence; identical to SEQ ID NO: 24
  Description of Artificial Sequence: Synthetic Heavy chain variable region CDR H3 nucleic acid sequence

SEQ ID NO: 1817 - DNA, 327 bp, Artificial Sequence
  Description of Artificial Sequence: Synthetic Light chain variable region nucleic acid sequence
cagactgtggtgacccaggagccatcgctctcagtgtcccctggagggacagtcacactcacttgtggatcaagcactggcgcagtcactactagtaactacgccaactgggtccagcagaccccaggccaggctccgcgcggactcatcggcggcacagacaagcgcgctcctggggtccctgatcgcttctctggctccctgcttggggacaaagctgccctcaccatcacgggggcccaggcagatgatgaagctgattattactgtgcgctgtggtacaataacctttgggtgttcggcggagggaccaagctgaccgtccta

SEQ ID NO: 1818 - protein, 109 aa, Artificial Sequence
  Description of Artificial Sequence: Synthetic Light chain variable region amino acid sequence
QTVVTQEPSLSVSPGGTVTLTCGSSTGAVTTSNYANWVQQTPGQAPRGLIGGTDKRAPGVPDRFSGSLLGDKAALTITGAQADDEADYYCALWYNNLWVFGGGTKLTVL

SEQ ID NO: 1819 - protein, 14 aa, Artificial Sequence
  Description of Artificial Sequence: Synthetic Light chain variable region CDR L1 amino acid sequence
GSSTGAVTTSNYAN

SEQ ID NO: 1820 - DNA, 42 bp, Artificial Sequence; identical to SEQ ID NO: 204
  Description of Artificial Sequence: Synthetic Light chain variable region CDR L1 nucleic acid sequence

SEQ ID NO: 1821 - protein, 7 aa, Artificial Sequence
  Description of Artificial Sequence: Synthetic Light chain variable region CDR L2 amino acid sequence
GTDKRAP

SEQ ID NO: 1822 - DNA, 21 bp, Artificial Sequence
  Description of Artificial Sequence: Synthetic Light chain variable region CDR L2 nucleic acid sequence
ggcacagacaagcgcgctcct

SEQ ID NO: 1823 - protein, 9 aa, Artificial Sequence
  Description of Artificial Sequence: Synthetic Light chain variable region CDR L3 amino acid sequence
ALWYNNLWV

SEQ ID NO: 1824 - DNA, 27 bp, Artificial Sequence
  Description of Artificial Sequence: Synthetic Light chain variable region CDR L3 nucleic acid sequence
gcgctgtggtacaataacctttgggtg

SEQ ID NO: 1825 - DNA, 375 bp, Artificial Sequence; identical to SEQ ID NO: 17
  Description of Artificial Sequence: Synthetic Heavy chain variable region nucleic acid sequence

SEQ ID NO: 1826 - protein, 125 aa, Artificial Sequence; identical to SEQ ID NO: 18
  Description of Artificial Sequence: Synthetic Heavy chain variable region amino acid sequence

SEQ ID NO: 1827 - protein, 9 aa, Artificial Sequence
  Description of Artificial Sequence: Synthetic Heavy chain variable region CDR H1 amino acid sequence
FTFDTYAMN

SEQ ID NO: 1828 - DNA, 27 bp, Artificial Sequence
  Description of Artificial Sequence: Synthetic Heavy chain variable region CDR H1 nucleic acid sequence
ttcacctttgacacatatgccatgaat

SEQ ID NO: 1829 - protein, 19 aa, Artificial Sequence
  Description of Artificial Sequence: Synthetic Heavy chain variable region CDR H2 amino acid sequence
RIRSKYNNYATYYADSVKD

SEQ ID NO: 1830 - DNA, 57 bp, Artificial Sequence; identical to SEQ ID NO: 6
  Description of Artificial Sequence: Synthetic Heavy chain variable region CDR H2 nucleic acid sequence

SEQ ID NO: 1831 - protein, 16 aa, Artificial Sequence
  Description of Artificial Sequence: Synthetic Heavy chain variable region CDR H3 amino acid sequence
VRHGNFGNGYVSWFAH

SEQ ID NO: 1832 - DNA, 48 bp, Artificial Sequence; identical to SEQ ID NO: 24
  Description of Artificial Sequence: Synthetic Heavy chain variable region CDR H3 nucleic acid sequence

SEQ ID NO: 1833 - DNA, 327 bp, Artificial Sequence
  Description of Artificial Sequence: Synthetic Light chain variable region nucleic acid sequence
cagactgtggtgacccaggagccatcgctctcagtgtcccctggagggacagtcacactcacttgtggatcaagcactggcgcagtcactactagtaactacgccaactgggtccagcagaccccaggccaggctccgcgcggactcatcggcggcacagacaagcgcgctcctggggtccctgatcgcttctctggctccctgcttggggacaaagctgccctcaccatcacgggggcccaggcagatgatgaagctgattattactgtgtgctgtggtacagtaacctttgggtgttcggcggagggaccaagctgaccgtccta

SEQ ID NO: 1834 - protein, 109 aa, Artificial Sequence
  Description of Artificial Sequence: Synthetic Light chain variable region amino acid sequence
QTVVTQEPSLSVSPGGTVTLTCGSSTGAVTTSNYANWVQQTPGQAPRGLIGGTDKRAPGVPDRFSGSLLGDKAALTITGAQADDEADYYCVLWYSNLWVFGGGTKLTVL

SEQ ID NO: 1835 - protein, 14 aa, Artificial Sequence
  Description of Artificial Sequence: Synthetic Light chain variable region CDR L1 amino acid sequence
GSSTGAVTTSNYAN

SEQ ID NO: 1836 - DNA, 42 bp, Artificial Sequence; identical to SEQ ID NO: 204
  Description of Artificial Sequence: Synthetic Light chain variable region CDR L1 nucleic acid sequence

SEQ ID NO: 1837 - protein, 7 aa, Artificial Sequence
  Description of Artificial Sequence: Synthetic Light chain variable region CDR L2 amino acid sequence
GTDKRAP

SEQ ID NO: 1838 - DNA, 21 bp, Artificial Sequence
  Description of Artificial Sequence: Synthetic Light chain variable region CDR L2 nucleic acid sequence
ggcacagacaagcgcgctcct

SEQ ID NO: 1839 - protein, 9 aa, Artificial Sequence
  Description of Artificial Sequence: Synthetic Light chain variable region CDR L3 amino acid sequence
VLWYSNLWV

SEQ ID NO: 1840 - DNA, 27 bp, Artificial Sequence
  Description of Artificial Sequence: Synthetic Light chain variable region CDR L3 nucleic acid sequence
gtgctgtggtacagtaacctttgggtg

SEQ ID NO: 1841 - DNA, 375 bp, Artificial Sequence; identical to SEQ ID NO: 65
  Description of Artificial Sequence: Synthetic Heavy chain variable region nucleic acid sequence

SEQ ID NO: 1842 - protein, 125 aa, Artificial Sequence; identical to SEQ ID NO: 66
  Description of Artificial Sequence: Synthetic Heavy chain variable region amino acid sequence

SEQ ID NO: 1843 - protein, 9 aa, Artificial Sequence
  Description of Artificial Sequence: Synthetic Heavy chain variable region CDR H1 amino acid sequence
FTFDTYAMN

SEQ ID NO: 1844 - DNA, 27 bp, Artificial Sequence
  Description of Artificial Sequence: Synthetic Heavy chain variable region CDR H1 nucleic acid sequence
ttcacctttgacacatatgccatgaat

SEQ ID NO: 1845 - protein, 19 aa, Artificial Sequence
  Description of Artificial Sequence: Synthetic Heavy chain variable region CDR H2 amino acid sequence
RIRSKYNNYATYYADSVKG

SEQ ID NO: 1846 - DNA, 57 bp, Artificial Sequence; identical to SEQ ID NO: 70
  Description of Artificial Sequence: Synthetic Heavy chain variable region CDR H2 nucleic acid sequence

SEQ ID NO: 1847 - protein, 16 aa, Artificial Sequence
  Description of Artificial Sequence: Synthetic Heavy chain variable region CDR H3 amino acid sequence
VRHGNFGNSYVSWFAH

SEQ ID NO: 1848 - DNA, 48 bp, Artificial Sequence; identical to SEQ ID NO: 72
  Description of Artificial Sequence: Synthetic Heavy chain variable region CDR H3 nucleic acid sequence

SEQ ID NO: 1849 - DNA, 327 bp, Artificial Sequence; identical to SEQ ID NO: 1673
  Description of Artificial Sequence: Synthetic Light chain variable region nucleic acid sequence

SEQ ID NO: 1850 - protein, 109 aa, Artificial Sequence; identical to SEQ ID NO: 1674
  Description of Artificial Sequence: Synthetic Light chain variable region amino acid sequence

SEQ ID NO: 1851 - protein, 14 aa, Artificial Sequence
  Description of Artificial Sequence: Synthetic Light chain variable region CDR L1 amino acid sequence
GSSTGAVTTSNYAN

SEQ ID NO: 1852 - DNA, 42 bp, Artificial Sequence; identical to SEQ ID NO: 204
  Description of Artificial Sequence: Synthetic Light chain variable region CDR L1 nucleic acid sequence

SEQ ID NO: 1853 - protein, 7 aa, Artificial Sequence
  Description of Artificial Sequence: Synthetic Light chain variable region CDR L2 amino acid sequence
GTDKRAP

SEQ ID NO: 1854 - DNA, 21 bp, Artificial Sequence
  Description of Artificial Sequence: Synthetic Light chain variable region CDR L2 nucleic acid sequence
ggcacagacaagcgcgctcct

SEQ ID NO: 1855 - protein, 9 aa, Artificial Sequence
  Description of Artificial Sequence: Synthetic Light chain variable region CDR L3 amino acid sequence
ALWYSNLWV

SEQ ID NO: 1856 - DNA, 27 bp, Artificial Sequence
  Description of Artificial Sequence: Synthetic Light chain variable region CDR L3 nucleic acid sequence
gcgctgtggtacagtaacctttgggtg

SEQ ID NO: 1857 - DNA, 375 bp, Artificial Sequence; identical to SEQ ID NO: 65
  Description of Artificial Sequence: Synthetic Heavy chain variable region nucleic acid sequence

SEQ ID NO: 1858 - protein, 125 aa, Artificial Sequence; identical to SEQ ID NO: 66
  Description of Artificial Sequence: Synthetic Heavy chain variable region amino acid sequence

SEQ ID NO: 1859 - protein, 9 aa, Artificial Sequence
  Description of Artificial Sequence: Synthetic Heavy chain variable region CDR H1 amino acid sequence
FTFDTYAMN

SEQ ID NO: 1860 - DNA, 27 bp, Artificial Sequence
  Description of Artificial Sequence: Synthetic Heavy chain variable region CDR H1 nucleic acid sequence
ttcacctttgacacatatgccatgaat

SEQ ID NO: 1861 - protein, 19 aa, Artificial Sequence
  Description of Artificial Sequence: Synthetic Heavy chain variable region CDR H2 amino acid sequence
RIRSKYNNYATYYADSVKG

SEQ ID NO: 1862 - DNA, 57 bp, Artificial Sequence; identical to SEQ ID NO: 70
  Description of Artificial Sequence: Synthetic Heavy chain variable region CDR H2 nucleic acid sequence

SEQ ID NO: 1863 - protein, 16 aa, Artificial Sequence
  Description of Artificial Sequence: Synthetic Heavy chain variable region CDR H3 amino acid sequence
VRHGNFGNSYVSWFAH

SEQ ID NO: 1864 - DNA, 48 bp, Artificial Sequence; identical to SEQ ID NO: 72
  Description of Artificial Sequence: Synthetic Heavy chain variable region CDR H3 nucleic acid sequence

SEQ ID NO: 1865 - DNA, 327 bp, Artificial Sequence; identical to SEQ ID NO: 1689
  Description of Artificial Sequence: Synthetic Light chain variable region nucleic acid sequence

SEQ ID NO: 1866 - protein, 109 aa, Artificial Sequence; identical to SEQ ID NO: 1690
  Description of Artificial Sequence: Synthetic Light chain variable region amino acid sequence

SEQ ID NO: 1867 - protein, 14 aa, Artificial Sequence
  Description of Artificial Sequence: Synthetic Light chain variable region CDR L1 amino acid sequence
GSSTGAVTTSNYAN

SEQ ID NO: 1868 - DNA, 42 bp, Artificial Sequence; identical to SEQ ID NO: 204
  Description of Artificial Sequence: Synthetic Light chain variable region CDR L1 nucleic acid sequence

SEQ ID NO: 1869 - protein, 7 aa, Artificial Sequence
  Description of Artificial Sequence: Synthetic Light chain variable region CDR L2 amino acid sequence
GTDKRAP

SEQ ID NO: 1870 - DNA, 21 bp, Artificial Sequence
  Description of Artificial Sequence: Synthetic Light chain variable region CDR L2 nucleic acid sequence
ggcacagacaagcgcgctcct

SEQ ID NO: 1871 - protein, 9 aa, Artificial Sequence
  Description of Artificial Sequence: Synthetic Light chain variable region CDR L3 amino acid sequence
ALWYSNLWV

SEQ ID NO: 1872 - DNA, 27 bp, Artificial Sequence
  Description of Artificial Sequence: Synthetic Light chain variable region CDR L3 nucleic acid sequence
gcgctgtggtacagtaacctttgggtg

SEQ ID NO: 1873 - DNA, 375 bp, Artificial Sequence; identical to SEQ ID NO: 65
  Description of Artificial Sequence: Synthetic Heavy chain variable region nucleic acid sequence

SEQ ID NO: 1874 - protein, 125 aa, Artificial Sequence; identical to SEQ ID NO: 66
  Description of Artificial Sequence: Synthetic Heavy chain variable region amino acid sequence

SEQ ID NO: 1875 - protein, 9 aa, Artificial Sequence
  Description of Artificial Sequence: Synthetic Heavy chain variable region CDR H1 amino acid sequence
FTFDTYAMN

SEQ ID NO: 1876 - DNA, 27 bp, Artificial Sequence
  Description of Artificial Sequence: Synthetic Heavy chain variable region CDR H1 nucleic acid sequence
ttcacctttgacacatatgccatgaat

SEQ ID NO: 1877 - protein, 19 aa, Artificial Sequence
  Description of Artificial Sequence: Synthetic Heavy chain variable region CDR H2 amino acid sequence
RIRSKYNNYATYYADSVKG

SEQ ID NO: 1878 - DNA, 57 bp, Artificial Sequence; identical to SEQ ID NO: 70
  Description of Artificial Sequence: Synthetic Heavy chain variable region CDR H2 nucleic acid sequence

SEQ ID NO: 1879 - protein, 16 aa, Artificial Sequence
  Description of Artificial Sequence: Synthetic Heavy chain variable region CDR H3 amino acid sequence
VRHGNFGNSYVSWFAH

SEQ ID NO: 1880 - DNA, 48 bp, Artificial Sequence; identical to SEQ ID NO: 72
  Description of Artificial Sequence: Synthetic Heavy chain variable region CDR H3 nucleic acid sequence

SEQ ID NO: 1881 - DNA, 327 bp, Artificial Sequence; identical to SEQ ID NO: 1705
  Description of Artificial Sequence: Synthetic Light chain variable region nucleic acid sequence

SEQ ID NO: 1882 - protein, 109 aa, Artificial Sequence; identical to SEQ ID NO: 1706
  Description of Artificial Sequence: Synthetic Light chain variable region amino acid sequence

SEQ ID NO: 1883 - protein, 14 aa, Artificial Sequence
  Description of Artificial Sequence: Synthetic Light chain variable region CDR L1 amino acid sequence
GSSTGAVTTSNYAN

SEQ ID NO: 1884 - DNA, 42 bp, Artificial Sequence; identical to SEQ ID NO: 204
  Description of Artificial Sequence: Synthetic Light chain variable region CDR L1 nucleic acid sequence

SEQ ID NO: 1885 - protein, 7 aa, Artificial Sequence
  Description of Artificial Sequence: Synthetic Light chain variable region CDR L2 amino acid sequence
GTDKRAP

SEQ ID NO: 1886 - DNA, 21 bp, Artificial Sequence
  Description of Artificial Sequence: Synthetic Light chain variable region CDR L2 nucleic acid sequence
ggcacagacaagcgcgctcct

SEQ ID NO: 1887 - protein, 9 aa, Artificial Sequence
  Description of Artificial Sequence: Synthetic Light chain variable region CDR L3 amino acid sequence
VLWYSNLWV

SEQ ID NO: 1888 - DNA, 27 bp, Artificial Sequence
  Description of Artificial Sequence: Synthetic Light chain variable region CDR L3 nucleic acid sequence
gtgctgtggtacagtaacctttgggtg

SEQ ID NO: 1889 - DNA, 375 bp, Artificial Sequence; identical to SEQ ID NO: 65
  Description of Artificial Sequence: Synthetic Heavy chain variable region nucleic acid sequence

SEQ ID NO: 1890 - protein, 125 aa, Artificial Sequence; identical to SEQ ID NO: 66
  Description of Artificial Sequence: Synthetic Heavy chain variable region amino acid sequence

SEQ ID NO: 1891 - protein, 9 aa, Artificial Sequence
  Description of Artificial Sequence: Synthetic Heavy chain variable region CDR H1 amino acid sequence
FTFDTYAMN

SEQ ID NO: 1892 - DNA, 27 bp, Artificial Sequence
  Description of Artificial Sequence: Synthetic Heavy chain variable region CDR H1 nucleic acid sequence
ttcacctttgacacatatgccatgaat

SEQ ID NO: 1893 - protein, 19 aa, Artificial Sequence
  Description of Artificial Sequence: Synthetic Heavy chain variable region CDR H2 amino acid sequence
RIRSKYNNYATYYADSVKG

SEQ ID NO: 1894 - DNA, 57 bp, Artificial Sequence; identical to SEQ ID NO: 70
  Description of Artificial Sequence: Synthetic Heavy chain variable region CDR H2 nucleic acid sequence

SEQ ID NO: 1895 - protein, 16 aa, Artificial Sequence
  Description of Artificial Sequence: Synthetic Heavy chain variable region CDR H3 amino acid sequence
VRHGNFGNSYVSWFAH

SEQ ID NO: 1896 - DNA, 48 bp, Artificial Sequence; identical to SEQ ID NO: 72
  Description of Artificial Sequence: Synthetic Heavy chain variable region CDR H3 nucleic acid sequence

SEQ ID NO: 1897 - DNA, 327 bp, Artificial Sequence; identical to SEQ ID NO: 201
  Description of Artificial Sequence: Synthetic Light chain variable region nucleic acid sequence

SEQ ID NO: 1898 - protein, 109 aa, Artificial Sequence; identical to SEQ ID NO: 202
  Description of Artificial Sequence: Synthetic Light chain variable region amino acid sequence

SEQ ID NO: 1899 - protein, 14 aa, Artificial Sequence
  Description of Artificial Sequence: Synthetic Light chain variable region CDR L1 amino acid sequence
GSSTGAVTTSNYAN

SEQ ID NO: 1900 - DNA, 42 bp, Artificial Sequence; identical to SEQ ID NO: 204
  Description of Artificial Sequence: Synthetic Light chain variable region CDR L1 nucleic acid sequence

SEQ ID NO: 1901 - protein, 7 aa, Artificial Sequence
  Description of Artificial Sequence: Synthetic Light chain variable region CDR L2 amino acid sequence
GTDKRAP

SEQ ID NO: 1902 - DNA, 21 bp, Artificial Sequence
  Description of Artificial Sequence: Synthetic Light chain variable region CDR L2 nucleic acid sequence
ggcacagacaagcgcgctcct

SEQ ID NO: 1903 - protein, 9 aa, Artificial Sequence
  Description of Artificial Sequence: Synthetic Light chain variable region CDR L3 amino acid sequence
ALWYSNHWV

SEQ ID NO: 1904 - DNA, 27 bp, Artificial Sequence
  Description of Artificial Sequence: Synthetic Light chain variable region CDR L3 nucleic acid sequence
gcgctgtggtacagtaaccattgggtg

SEQ ID NO: 1905 - DNA, 375 bp, Artificial Sequence; identical to SEQ ID NO: 65
  Description of Artificial Sequence: Synthetic Heavy chain variable region nucleic acid sequence

SEQ ID NO: 1906 - protein, 125 aa, Artificial Sequence; identical to SEQ ID NO: 66
  Description of Artificial Sequence: Synthetic Heavy chain variable region amino acid sequence

SEQ ID NO: 1907 - protein, 9 aa, Artificial Sequence
  Description of Artificial Sequence: Synthetic Heavy chain variable region CDR H1 amino acid sequence
FTFDTYAMN

SEQ ID NO: 1908 - DNA, 27 bp, Artificial Sequence
  Description of Artificial Sequence: Synthetic Heavy chain variable region CDR H1 nucleic acid sequence
ttcacctttgacacatatgccatgaat

SEQ ID NO: 1909 - protein, 19 aa, Artificial Sequence
  Description of Artificial Sequence: Synthetic Heavy chain variable region CDR H2 amino acid sequence
RIRSKYNNYATYYADSVKG

SEQ ID NO: 1910 - DNA, 57 bp, Artificial Sequence; identical to SEQ ID NO: 70
  Description of Artificial Sequence: Synthetic Heavy chain variable region CDR H2 nucleic acid sequence

SEQ ID NO: 1911 - protein, 16 aa, Artificial Sequence
  Description of Artificial Sequence: Synthetic Heavy chain variable region CDR H3 amino acid sequence
VRHGNFGNSYVSWFAH

SEQ ID NO: 1912 - DNA, 48 bp, Artificial Sequence; identical to SEQ ID NO: 72
  Description of Artificial Sequence: Synthetic Heavy chain variable region CDR H3 nucleic acid sequence

SEQ ID NO: 1913 - DNA, 327 bp, Artificial Sequence; identical to SEQ ID NO: 1721
  Description of Artificial Sequence: Synthetic Light chain variable region nucleic acid sequence

SEQ ID NO: 1914 - protein, 109 aa, Artificial Sequence; identical to SEQ ID NO: 1722
  Description of Artificial Sequence: Synthetic Light chain variable region amino acid sequence

SEQ ID NO: 1915 - protein, 14 aa, Artificial Sequence
  Description of Artificial Sequence: Synthetic Light chain variable region CDR L1 amino acid sequence
GSSTGAVTTSNYAN

SEQ ID NO: 1916 - DNA, 42 bp, Artificial Sequence; identical to SEQ ID NO: 204
  Description of Artificial Sequence: Synthetic Light chain variable region CDR L1 nucleic acid sequence

SEQ ID NO: 1917 - protein, 7 aa, Artificial Sequence
  Description of Artificial Sequence: Synthetic Light chain variable region CDR L2 amino acid sequence
GTDKRAP

SEQ ID NO: 1918 - DNA, 21 bp, Artificial Sequence
  Description of Artificial Sequence: Synthetic Light chain variable region CDR L2 nucleic acid sequence
ggcacagacaagcgcgctcct

SEQ ID NO: 1919 - protein, 9 aa, Artificial Sequence
  Description of Artificial Sequence: Synthetic Light chain variable region CDR L3 amino acid sequence
ALWYSNLWV

SEQ ID NO: 1920 - DNA, 27 bp, Artificial Sequence
  Description of Artificial Sequence: Synthetic Light chain variable region CDR L3 nucleic acid sequence
gcgctgtggtacagtaacctttgggtg

SEQ ID NO: 1921 - DNA, 375 bp, Artificial Sequence; identical to SEQ ID NO: 65
  Description of Artificial Sequence: Synthetic Heavy chain variable region nucleic acid sequence

SEQ ID NO: 1922 - protein, 125 aa, Artificial Sequence; identical to SEQ ID NO: 66
  Description of Artificial Sequence: Synthetic Heavy chain variable region amino acid sequence

SEQ ID NO: 1923 - protein, 9 aa, Artificial Sequence
  Description of Artificial Sequence: Synthetic Heavy chain variable region CDR H1 amino acid sequence
FTFDTYAMN

SEQ ID NO: 1924 - DNA, 27 bp, Artificial Sequence
  Description of Artificial Sequence: Synthetic Heavy chain variable region CDR H1 nucleic acid sequence
ttcacctttgacacatatgccatgaat

SEQ ID NO: 1925 - protein, 19 aa, Artificial Sequence
  Description of Artificial Sequence: Synthetic Heavy chain variable region CDR H2 amino acid sequence
RIRSKYNNYATYYADSVKG

SEQ ID NO: 1926 - DNA, 57 bp, Artificial Sequence; identical to SEQ ID NO: 70
  Description of Artificial Sequence: Synthetic Heavy chain variable region CDR H2 nucleic acid sequence

SEQ ID NO: 1927 - protein, 16 aa, Artificial Sequence
  Description of Artificial Sequence: Synthetic Heavy chain variable region CDR H3 amino acid sequence
VRHGNFGNSYVSWFAH

SEQ ID NO: 1928 - DNA, 48 bp, Artificial Sequence; identical to SEQ ID NO: 72
  Description of Artificial Sequence: Synthetic Heavy chain variable region CDR H3 nucleic acid sequence

SEQ ID NO: 1929 - DNA, 327 bp, Artificial Sequence; identical to SEQ ID NO: 1753
  Description of Artificial Sequence: Synthetic Light chain variable region nucleic acid sequence

SEQ ID NO: 1930 - protein, 109 aa, Artificial Sequence; identical to SEQ ID NO: 1754
  Description of Artificial Sequence: Synthetic Light chain variable region amino acid sequence

SEQ ID NO: 1931 - protein, 14 aa, Artificial Sequence
  Description of Artificial Sequence: Synthetic Light chain variable region CDR L1 amino acid sequence
GSSTGAVTTSNYAN

SEQ ID NO: 1932 - DNA, 42 bp, Artificial Sequence; identical to SEQ ID NO: 204
  Description of Artificial Sequence: Synthetic Light chain variable region CDR L1 nucleic acid sequence

SEQ ID NO: 1933 - protein, 7 aa, Artificial Sequence
  Description of Artificial Sequence: Synthetic Light chain variable region CDR L2 amino acid sequence
GTDKRAP

SEQ ID NO: 1934 - DNA, 21 bp, Artificial Sequence
  Description of Artificial Sequence: Synthetic Light chain variable region CDR L2 nucleic acid sequence
ggcacagacaagcgcgctcct

SEQ ID NO: 1935 - protein, 9 aa, Artificial Sequence
  Description of Artificial Sequence: Synthetic Light chain variable region CDR L3 amino acid sequence
ALWYSNLWV

SEQ ID NO: 1936 - DNA, 27 bp, Artificial Sequence
  Description of Artificial Sequence: Synthetic Light chain variable region CDR L3 nucleic acid sequence
gcgctgtggtacagtaacctttgggtg

SEQ ID NO: 1937 - DNA, 375 bp, Artificial Sequence; identical to SEQ ID NO: 65
  Description of Artificial Sequence: Synthetic Heavy chain variable region nucleic acid sequence

SEQ ID NO: 1938 - protein, 125 aa, Artificial Sequence; identical to SEQ ID NO: 66
  Description of Artificial Sequence: Synthetic Heavy chain variable region amino acid sequence

SEQ ID NO: 1939 - protein, 9 aa, Artificial Sequence
  Description of Artificial Sequence: Synthetic Heavy chain variable region CDR H1 amino acid sequence
FTFDTYAMN

SEQ ID NO: 1940 - DNA, 27 bp, Artificial Sequence
  Description of Artificial Sequence: Synthetic Heavy chain variable region CDR H1 nucleic acid sequence
ttcacctttgacacatatgccatgaat

SEQ ID NO: 1941 - protein, 19 aa, Artificial Sequence
  Description of Artificial Sequence: Synthetic Heavy chain variable region CDR H2 amino acid sequence
RIRSKYNNYATYYADSVKG

SEQ ID NO: 1942 - DNA, 57 bp, Artificial Sequence; identical to SEQ ID NO: 70
  Description of Artificial Sequence: Synthetic Heavy chain variable region CDR H2 nucleic acid sequence

SEQ ID NO: 1943 - protein, 16 aa, Artificial Sequence
  Description of Artificial Sequence: Synthetic Heavy chain variable region CDR H3 amino acid sequence
VRHGNFGNSYVSWFAH

SEQ ID NO: 1944 - DNA, 48 bp, Artificial Sequence; identical to SEQ ID NO: 72
  Description of Artificial Sequence: Synthetic Heavy chain variable region CDR H3 nucleic acid sequence

SEQ ID NO: 1945 - DNA, 327 bp, Artificial Sequence; identical to SEQ ID NO: 1769
  Description of Artificial Sequence: Synthetic Light chain variable region nucleic acid sequence

SEQ ID NO: 1946 - protein, 109 aa, Artificial Sequence; identical to SEQ ID NO: 1770
  Description of Artificial Sequence: Synthetic Light chain variable region amino acid sequence

SEQ ID NO: 1947 - protein, 14 aa, Artificial Sequence
  Description of Artificial Sequence: Synthetic Light chain variable region CDR L1 amino acid sequence
GSSTGAVTTSNYAN

SEQ ID NO: 1948 - DNA, 42 bp, Artificial Sequence; identical to SEQ ID NO: 204
  Description of Artificial Sequence: Synthetic Light chain variable region CDR L1 nucleic acid sequence

SEQ ID NO: 1949 - protein, 7 aa, Artificial Sequence
  Description of Artificial Sequence: Synthetic Light chain variable region CDR L2 amino acid sequence
GTDKRAP

SEQ ID NO: 1950 - DNA, 21 bp, Artificial Sequence
  Description of Artificial Sequence: Synthetic Light chain variable region CDR L2 nucleic acid sequence
ggcacagacaagcgcgctcct

SEQ ID NO: 1951 - protein, 9 aa, Artificial Sequence
  Description of Artificial Sequence: Synthetic Light chain variable region CDR L3 amino acid sequence
ALWYNNLWV

SEQ ID NO: 1952 - DNA, 27 bp, Artificial Sequence
  Description of Artificial Sequence: Synthetic Light chain variable region CDR L3 nucleic acid sequence
gcgctgtggtacaataacctttgggtg

SEQ ID NO: 1953 - DNA, 375 bp, Artificial Sequence; identical to SEQ ID NO: 65
  Description of Artificial Sequence: Synthetic Heavy chain variable region nucleic acid sequence

SEQ ID NO: 1954 - protein, 125 aa, Artificial Sequence; identical to SEQ ID NO: 66
  Description of Artificial Sequence: Synthetic Heavy chain variable region amino acid sequence

SEQ ID NO: 1955 - protein, 9 aa, Artificial Sequence
  Description of Artificial Sequence: Synthetic Heavy chain variable region CDR H1 amino acid sequence
FTFDTYAMN

SEQ ID NO: 1956 - DNA, 27 bp, Artificial Sequence
  Description of Artificial Sequence: Synthetic Heavy chain variable region CDR H1 nucleic acid sequence
ttcacctttgacacatatgccatgaat

SEQ ID NO: 1957 - protein, 19 aa, Artificial Sequence
  Description of Artificial Sequence: Synthetic Heavy chain variable region CDR H2 amino acid sequence
RIRSKYNNYATYYADSVKG

SEQ ID NO: 1958 - DNA, 57 bp, Artificial Sequence; identical to SEQ ID NO: 70
  Description of Artificial Sequence: Synthetic Heavy chain variable region CDR H2 nucleic acid sequence

SEQ ID NO: 1959 - protein, 16 aa, Artificial Sequence
  Description of Artificial Sequence: Synthetic Heavy chain variable region CDR H3 amino acid sequence
VRHGNFGNSYVSWFAH

SEQ ID NO: 1960 - DNA, 48 bp, Artificial Sequence; identical to SEQ ID NO: 72
  Description of Artificial Sequence: Synthetic Heavy chain variable region CDR H3 nucleic acid sequence

SEQ ID NO: 1961 - DNA, 327 bp, Artificial Sequence; identical to SEQ ID NO: 1785
  Description of Artificial Sequence: Synthetic Light chain variable region nucleic acid sequence

SEQ ID NO: 1962 - protein, 109 aa, Artificial Sequence; identical to SEQ ID NO: 1786
  Description of Artificial Sequence: Synthetic Light chain variable region amino acid sequence

SEQ ID NO: 1963 - protein, 14 aa, Artificial Sequence
  Description of Artificial Sequence: Synthetic Light chain variable region CDR L1 amino acid sequence
GSSTGAVTTSNYAN

SEQ ID NO: 1964 - DNA, 42 bp, Artificial Sequence; identical to SEQ ID NO: 204
  Description of Artificial Sequence: Synthetic Light chain variable region CDR L1 nucleic acid sequence

SEQ ID NO: 1965 - protein, 7 aa, Artificial Sequence
  Description of Artificial Sequence: Synthetic Light chain variable region CDR L2 amino acid sequence
GTDKRAP

SEQ ID NO: 1966 - DNA, 21 bp, Artificial Sequence
  Description of Artificial Sequence: Synthetic Light chain variable region CDR L2 nucleic acid sequence
ggcacagacaagcgcgctcct

SEQ ID NO: 1967 - protein, 9 aa, Artificial Sequence
  Description of Artificial Sequence: Synthetic Light chain variable region CDR L3 amino acid sequence
VLWYSNLWV

SEQ ID NO: 1968 - DNA, 27 bp, Artificial Sequence
  Description of Artificial Sequence: Synthetic Light chain variable region CDR L3 nucleic acid sequence
gtgctgtggtacagtaacctttgggtg

SEQ ID NO: 1969 - DNA, 375 bp, Artificial Sequence; identical to SEQ ID NO: 65
  Description of Artificial Sequence: Synthetic Heavy chain variable region nucleic acid sequence

SEQ ID NO: 1970 - protein, 125 aa, Artificial Sequence; identical to SEQ ID NO: 66
  Description of Artificial Sequence: Synthetic Heavy chain variable region amino acid sequence

SEQ ID NO: 1971 - protein, 9 aa, Artificial Sequence
  Description of Artificial Sequence: Synthetic Heavy chain variable region CDR H1 amino acid sequence
FTFDTYAMN

SEQ ID NO: 1972 - DNA, 27 bp, Artificial Sequence
  Description of Artificial Sequence: Synthetic Heavy chain variable region CDR H1 nucleic acid sequence
ttcacctttgacacatatgccatgaat

SEQ ID NO: 1973 - protein, 19 aa, Artificial Sequence
  Description of Artificial Sequence: Synthetic Heavy chain variable region CDR H2 amino acid sequence
RIRSKYNNYATYYADSVKG

SEQ ID NO: 1974 - DNA, 57 bp, Artificial Sequence; identical to SEQ ID NO: 70
  Description of Artificial Sequence: Synthetic Heavy chain variable region CDR H2 nucleic acid sequence

SEQ ID NO: 1975 - protein, 16 aa, Artificial Sequence
  Description of Artificial Sequence: Synthetic Heavy chain variable region CDR H3 amino acid sequence
VRHGNFGNSYVSWFAH

SEQ ID NO: 1976 - DNA, 48 bp, Artificial Sequence; identical to SEQ ID NO: 72
  Description of Artificial Sequence: Synthetic Heavy chain variable region CDR H3 nucleic acid sequence

SEQ ID NO: 1977 - DNA, 327 bp, Artificial Sequence; identical to SEQ ID NO: 217
  Description of Artificial Sequence: Synthetic Light chain variable region nucleic acid sequence

SEQ ID NO: 1978 - protein, 109 aa, Artificial Sequence; identical to SEQ ID NO: 218
  Description of Artificial Sequence: Synthetic Light chain variable region amino acid sequence

SEQ ID NO: 1979 - protein, 14 aa, Artificial Sequence
  Description of Artificial Sequence: Synthetic Light chain variable region CDR L1 amino acid sequence
GSSTGAVTTSNYAN

SEQ ID NO: 1980 - DNA, 42 bp, Artificial Sequence; identical to SEQ ID NO: 204
  Description of Artificial Sequence: Synthetic Light chain variable region CDR L1 nucleic acid sequence

SEQ ID NO: 1981 - protein, 7 aa, Artificial Sequence
  Description of Artificial Sequence: Synthetic Light chain variable region CDR L2 amino acid sequence
GTDKRAP

SEQ ID NO: 1982 - DNA, 21 bp, Artificial Sequence
  Description of Artificial Sequence: Synthetic Light chain variable region CDR L2 nucleic acid sequence
ggcacagacaagcgcgctcct

SEQ ID NO: 1983 - protein, 9 aa, Artificial Sequence
  Description of Artificial Sequence: Synthetic Light chain variable region CDR L3 amino acid sequence
ALWYSNHWV

SEQ ID NO: 1984 - DNA, 27 bp, Artificial Sequence
  Description of Artificial Sequence: Synthetic Light chain variable region CDR L3 nucleic acid sequence
gcgctgtggtacagtaaccattgggtg

SEQ ID NO: 1985 - DNA, 375 bp, Artificial Sequence; identical to SEQ ID NO: 65
  Description of Artificial Sequence: Synthetic Heavy chain variable region nucleic acid sequence

SEQ ID NO: 1986 - protein, 125 aa, Artificial Sequence; identical to SEQ ID NO: 66
  Description of Artificial Sequence: Synthetic Heavy chain variable region amino acid sequence

SEQ ID NO: 1987 - protein, 9 aa, Artificial Sequence
  Description of Artificial Sequence: Synthetic Heavy chain variable region CDR H1 amino acid sequence
FTFDTYAMN

SEQ ID NO: 1988 - DNA, 27 bp, Artificial Sequence
  Description of Artificial Sequence: Synthetic Heavy chain variable region CDR H1 nucleic acid sequence
ttcacctttgacacatatgccatgaat

SEQ ID NO: 1989 - protein, 19 aa, Artificial Sequence
  Description of Artificial Sequence: Synthetic Heavy chain variable region CDR H2 amino acid sequence
RIRSKYNNYATYYADSVKG

SEQ ID NO: 1990 - DNA, 57 bp, Artificial Sequence; identical to SEQ ID NO: 70
  Description of Artificial Sequence: Synthetic Heavy chain variable region CDR H2 nucleic acid sequence

SEQ ID NO: 1991 - protein, 16 aa, Artificial Sequence
  Description of Artificial Sequence: Synthetic Heavy chain variable region CDR H3 amino acid sequence
VRHGNFGNSYVSWFAH

SEQ ID NO: 1992 - DNA, 48 bp, Artificial Sequence; identical to SEQ ID NO: 72
  Description of Artificial Sequence: Synthetic Heavy chain variable region CDR H3 nucleic acid sequence

SEQ ID NO: 1993 - DNA, 327 bp, Artificial Sequence; identical to SEQ ID NO: 1801
  Description of Artificial Sequence: Synthetic Light chain variable region nucleic acid sequence

SEQ ID NO: 1994 - protein, 109 aa, Artificial Sequence; identical to SEQ ID NO: 1802
  Description of Artificial Sequence: Synthetic Light chain variable region amino acid sequence

SEQ ID NO: 1995 - protein, 14 aa, Artificial Sequence
  Description of Artificial Sequence: Synthetic Light chain variable region CDR L1 amino acid sequence
GSSAGAVTTSNYAN

SEQ ID NO: 1996 - DNA, 42 bp, Artificial Sequence; identical to SEQ ID NO: 236
  Description of Artificial Sequence: Synthetic Light chain variable region CDR L1 nucleic acid sequence

SEQ ID NO: 1997 - protein, 7 aa, Artificial Sequence
  Description of Artificial Sequence: Synthetic Light chain variable region CDR L2 amino acid sequence
GTDKRAP

SEQ ID NO: 1998 - DNA, 21 bp, Artificial Sequence
  Description of Artificial Sequence: Synthetic Light chain variable region CDR L2 nucleic acid sequence
ggcacagacaagcgcgctcct

SEQ ID NO: 1999 - protein, 9 aa, Artificial Sequence
  Description of Artificial Sequence: Synthetic Light chain variable region CDR L3 amino acid sequence
ALWYSNLWV

SEQ ID NO: 2000 - DNA, 27 bp, Artificial Sequence
  Description of Artificial Sequence: Synthetic Light chain variable region CDR L3 nucleic acid sequence
gcgctgtggtacagtaacctttgggtg

SEQ ID NO: 2001 - DNA, 375 bp, Artificial Sequence; identical to SEQ ID NO: 65
  Description of Artificial Sequence: Synthetic Heavy chain variable region nucleic acid sequence

SEQ ID NO: 2002 - protein, 125 aa, Artificial Sequence; identical to SEQ ID NO: 66
  Description of Artificial Sequence: Synthetic Heavy chain variable region amino acid sequence

SEQ ID NO: 2003 - protein, 9 aa, Artificial Sequence
  Description of Artificial Sequence: Synthetic Heavy chain variable region CDR H1 amino acid sequence
FTFDTYAMN

SEQ ID NO: 2004 - DNA, 27 bp, Artificial Sequence
  Description of Artificial Sequence: Synthetic Heavy chain variable region CDR H1 nucleic acid sequence
ttcacctttgacacatatgccatgaat

SEQ ID NO: 2005 - protein, 19 aa, Artificial Sequence
  Description of Artificial Sequence: Synthetic Heavy chain variable region CDR H2 amino acid sequence
RIRSKYNNYATYYADSVKG

SEQ ID NO: 2006 - DNA, 57 bp, Artificial Sequence; identical to SEQ ID NO: 70
  Description of Artificial Sequence: Synthetic Heavy chain variable region CDR H2 nucleic acid sequence

SEQ ID NO: 2007 - protein, 16 aa, Artificial Sequence
  Description of Artificial Sequence: Synthetic Heavy chain variable region CDR H3 amino acid sequence
VRHGNFGNSYVSWFAH

SEQ ID NO: 2008 - DNA, 48 bp, Artificial Sequence; identical to SEQ ID NO: 72
  Description of Artificial Sequence: Synthetic Heavy chain variable region CDR H3 nucleic acid sequence

SEQ ID NO: 2009 - DNA, 327 bp, Artificial Sequence; identical to SEQ ID NO: 233
  Description of Artificial Sequence: Synthetic Light chain variable region nucleic acid sequence

SEQ ID NO: 2010 - protein, 109 aa, Artificial Sequence; identical to SEQ ID NO: 234
  Description of Artificial Sequence: Synthetic Light chain variable region amino acid sequence

SEQ ID NO: 2011 - protein, 14 aa, Artificial Sequence
  Description of Artificial Sequence: Synthetic Light chain variable region CDR L1 amino acid sequence
GSSAGAVTTSNYAN

SEQ ID NO: 2012 - DNA, 42 bp, Artificial Sequence; identical to SEQ ID NO: 236
  Description of Artificial Sequence: Synthetic Light chain variable region CDR L1 nucleic acid sequence

SEQ ID NO: 2013 - protein, 7 aa, Artificial Sequence
  Description of Artificial Sequence: Synthetic Light chain variable region CDR L2 amino acid sequence
GTDKRAP

SEQ ID NO: 2014 - DNA, 21 bp, Artificial Sequence
  Description of Artificial Sequence: Synthetic Light chain variable region CDR L2 nucleic acid sequence
ggcacagacaagcgcgctcct

SEQ ID NO: 2015 - protein, 9 aa, Artificial Sequence
  Description of Artificial Sequence: Synthetic Light chain variable region CDR L3 amino acid sequence
VLWYSNLWV

SEQ ID NO: 2016 - DNA, 27 bp, Artificial Sequence
  Description of Artificial Sequence: Synthetic Light chain variable region CDR L3 nucleic acid sequence
gtgctgtggtacagtaacctttgggtg

SEQ ID NO: 2017 - DNA, 375 bp, Artificial Sequence; identical to SEQ ID NO: 65
  Description of Artificial Sequence: Synthetic Heavy chain variable region nucleic acid sequence

SEQ ID NO: 2018 - protein, 125 aa, Artificial Sequence; identical to SEQ ID NO: 66
  Description of Artificial Sequence: Synthetic Heavy chain variable region amino acid sequence

SEQ ID NO: 2019 - protein, 9 aa, Artificial Sequence
  Description of Artificial Sequence: Synthetic Heavy chain variable region CDR H1 amino acid sequence
FTFDTYAMN

SEQ ID NO: 2020 - DNA, 27 bp, Artificial Sequence
  Description of Artificial Sequence: Synthetic Heavy chain variable region CDR H1 nucleic acid sequence
ttcacctttgacacatatgccatgaat

SEQ ID NO: 2021 - protein, 19 aa, Artificial Sequence
  Description of Artificial Sequence: Synthetic Heavy chain variable region CDR H2 amino acid sequence
RIRSKYNNYATYYADSVKG

SEQ ID NO: 2022 - DNA, 57 bp, Artificial Sequence; identical to SEQ ID NO: 70
  Description of Artificial Sequence: Synthetic Heavy chain variable region CDR H2 nucleic acid sequence

SEQ ID NO: 2023 - protein, 16 aa, Artificial Sequence
  Description of Artificial Sequence: Synthetic Heavy chain variable region CDR H3 amino acid sequence
VRHGNFGNSYVSWFAH

SEQ ID NO: 2024 - DNA, 48 bp, Artificial Sequence; identical to SEQ ID NO: 72
  Description of Artificial Sequence: Synthetic Heavy chain variable region CDR H3 nucleic acid sequence

SEQ ID NO: 2025 - DNA, 327 bp, Artificial Sequence; identical to SEQ ID NO: 249
  Description of Artificial Sequence: Synthetic Light chain variable region nucleic acid sequence

SEQ ID NO: 2026 - protein, 109 aa, Artificial Sequence; identical to SEQ ID NO: 250
  Description of Artificial Sequence: Synthetic Light chain variable region amino acid sequence

SEQ ID NO: 2027 - protein, 14 aa, Artificial Sequence
  Description of Artificial Sequence: Synthetic Light chain variable region CDR L1 amino acid sequence
GSSAGAVTTSNYAN

SEQ ID NO: 2028 - DNA, 42 bp, Artificial Sequence; identical to SEQ ID NO: 236
  Description of Artificial Sequence: Synthetic Light chain variable region CDR L1 nucleic acid sequence

SEQ ID NO: 2029 - protein, 7 aa, Artificial Sequence
  Description of Artificial Sequence: Synthetic Light chain variable region CDR L2 amino acid sequence
GTDKRAP

SEQ ID NO: 2030 - DNA, 21 bp, Artificial Sequence
  Description of Artificial Sequence: Synthetic Light chain variable region CDR L2 nucleic acid sequence
ggcacagacaagcgcgctcct

SEQ ID NO: 2031 - protein, 9 aa, Artificial Sequence
  Description of Artificial Sequence: Synthetic Light chain variable region CDR L3 amino acid sequence
ALWYSNHWV

SEQ ID NO: 2032 - DNA, 27 bp, Artificial Sequence
  Description of Artificial Sequence: Synthetic Light chain variable region CDR L3 nucleic acid sequence
gcgctgtggtacagtaaccattgggtg

SEQ ID NO: 2033 - DNA, 375 bp, Artificial Sequence; identical to SEQ ID NO: 65
  Description of Artificial Sequence: Synthetic Heavy chain variable region nucleic acid sequence

SEQ ID NO: 2034 - protein, 125 aa, Artificial Sequence; identical to SEQ ID NO: 66
  Description of Artificial Sequence: Synthetic Heavy chain variable region amino acid sequence

SEQ ID NO: 2035 - protein, 9 aa, Artificial Sequence
  Description of Artificial Sequence: Synthetic Heavy chain variable region CDR H1 amino acid sequence
FTFDTYAMN

SEQ ID NO: 2036 - DNA, 27 bp, Artificial Sequence
  Description of Artificial Sequence: Synthetic Heavy chain variable region CDR H1 nucleic acid sequence
ttcacctttgacacatatgccatgaat

SEQ ID NO: 2037 - protein, 19 aa, Artificial Sequence
  Description of Artificial Sequence: Synthetic Heavy chain variable region CDR H2 amino acid sequence
RIRSKYNNYATYYADSVKG

SEQ ID NO: 2038 - DNA, 57 bp, Artificial Sequence; identical to SEQ ID NO: 70
  Description of Artificial Sequence: Synthetic Heavy chain variable region CDR H2 nucleic acid sequence

SEQ ID NO: 2039 - protein, 16 aa, Artificial Sequence
  Description of Artificial Sequence: Synthetic Heavy chain variable region CDR H3 amino acid sequence
VRHGNFGNSYVSWFAH

SEQ ID NO: 2040 - DNA, 48 bp, Artificial Sequence; identical to SEQ ID NO: 72
  Description of Artificial Sequence: Synthetic Heavy chain variable region CDR H3 nucleic acid sequence

SEQ ID NO: 2041 - DNA, 327 bp, Artificial Sequence; identical to SEQ ID NO: 1817
  Description of Artificial Sequence: Synthetic Light chain variable region nucleic acid sequence

SEQ ID NO: 2042 - protein, 109 aa, Artificial Sequence; identical to SEQ ID NO: 1818
  Description of Artificial Sequence: Synthetic Light chain variable region amino acid sequence

SEQ ID NO: 2043 - protein, 14 aa, Artificial Sequence
  Description of Artificial Sequence: Synthetic Light chain variable region CDR L1 amino acid sequence
GSSTGAVTTSNYAN

SEQ ID NO: 2044 - DNA, 42 bp, Artificial Sequence; identical to SEQ ID NO: 204
  Description of Artificial Sequence: Synthetic Light chain variable region CDR L1 nucleic acid sequence

SEQ ID NO: 2045 - protein, 7 aa, Artificial Sequence
  Description of Artificial Sequence: Synthetic Light chain variable region CDR L2 amino acid sequence
GTDKRAP

SEQ ID NO: 2046 - DNA, 21 bp, Artificial Sequence
  Description of Artificial Sequence: Synthetic Light chain variable region CDR L2 nucleic acid sequence
ggcacagacaagcgcgctcct

SEQ ID NO: 2047 - protein, 9 aa, Artificial Sequence
  Description of Artificial Sequence: Synthetic Light chain variable region CDR L3 amino acid sequence
ALWYNNLWV

SEQ ID NO: 2048 - DNA, 27 bp, Artificial Sequence
  Description of Artificial Sequence: Synthetic Light chain variable region CDR L3 nucleic acid sequence
gcgctgtggtacaataacctttgggtg

SEQ ID NO: 2049 - DNA, 375 bp, Artificial Sequence; identical to SEQ ID NO: 65
  Description of Artificial Sequence: Synthetic Heavy chain variable region nucleic acid sequence

SEQ ID NO: 2050 - protein, 125 aa, Artificial Sequence; identical to SEQ ID NO: 66
  Description of Artificial Sequence: Synthetic Heavy chain variable region amino acid sequence

SEQ ID NO: 2051 - protein, 9 aa, Artificial Sequence
  Description of Artificial Sequence: Synthetic Heavy chain variable region CDR H1 amino acid sequence
FTFDTYAMN

SEQ ID NO: 2052 - DNA, 27 bp, Artificial Sequence
  Description of Artificial Sequence: Synthetic Heavy chain variable region CDR H1 nucleic acid sequence
ttcacctttgacacatatgccatgaat

SEQ ID NO: 2053 - protein, 19 aa, Artificial Sequence
  Description of Artificial Sequence: Synthetic Heavy chain variable region CDR H2 amino acid sequence
RIRSKYNNYATYYADSVKG

SEQ ID NO: 2054 - DNA, 57 bp, Artificial Sequence; identical to SEQ ID NO: 70
  Description of Artificial Sequence: Synthetic Heavy chain variable region CDR H2 nucleic acid sequence

SEQ ID NO: 2055 - protein, 16 aa, Artificial Sequence
  Description of Artificial Sequence: Synthetic Heavy chain variable region CDR H3 amino acid sequence
VRHGNFGNSYVSWFAH

SEQ ID NO: 2056 - DNA, 48 bp, Artificial Sequence; identical to SEQ ID NO: 72
  Description of Artificial Sequence: Synthetic Heavy chain variable region CDR H3 nucleic acid sequence

SEQ ID NO: 2057 - DNA, 327 bp, Artificial Sequence; identical to SEQ ID NO: 1833
  Description of Artificial Sequence: Synthetic Light chain variable region nucleic acid sequence

SEQ ID NO: 2058 - protein, 109 aa, Artificial Sequence; identical to SEQ ID NO: 1834
  Description of Artificial Sequence: Synthetic Light chain variable region amino acid sequence

SEQ ID NO: 2059 - protein, 14 aa, Artificial Sequence
  Description of Artificial Sequence: Synthetic Light chain variable region CDR L1 amino acid sequence
GSSTGAVTTSNYAN

SEQ ID NO: 2060 - DNA, 42 bp, Artificial Sequence; identical to SEQ ID NO: 204
  Description of Artificial Sequence: Synthetic Light chain variable region CDR L1 nucleic acid sequence

SEQ ID NO: 2061 - protein, 7 aa, Artificial Sequence
  Description of Artificial Sequence: Synthetic Light chain variable region CDR L2 amino acid sequence
GTDKRAP

SEQ ID NO: 2062 - DNA, 21 bp, Artificial Sequence
  Description of Artificial Sequence: Synthetic Light chain variable region CDR L2 nucleic acid sequence
ggcacagacaagcgcgctcct

SEQ ID NO: 2063 - protein, 9 aa, Artificial Sequence
  Description of Artificial Sequence: Synthetic Light chain variable region CDR L3 amino acid sequence
VLWYSNLWV

SEQ ID NO: 2064 - DNA, 27 bp, Artificial Sequence
  Description of Artificial Sequence: Synthetic Light chain variable region CDR L3 nucleic acid sequence
gtgctgtggtacagtaacctttgggtg

SEQ ID NO: 2065 - DNA, 375 bp, Artificial Sequence; identical to SEQ ID NO: 145
  Description of Artificial Sequence: Synthetic Heavy chain variable region nucleic acid sequence

SEQ ID NO: 2066 - protein, 125 aa, Artificial Sequence; identical to SEQ ID NO: 146
  Description of Artificial Sequence: Synthetic Heavy chain variable region amino acid sequence

SEQ ID NO: 2067 - protein, 9 aa, Artificial Sequence
  Description of Artificial Sequence: Synthetic Heavy chain variable region CDR H1 amino acid sequence
FTFDTYAMN

SEQ ID NO: 2068 - DNA, 27 bp, Artificial Sequence
  Description of Artificial Sequence: Synthetic Heavy chain variable region CDR H1 nucleic acid sequence
ttcacctttgacacatatgccatgaat

SEQ ID NO: 2069 - protein, 19 aa, Artificial Sequence
  Description of Artificial Sequence: Synthetic Heavy chain variable region CDR H2 amino acid sequence
RIRSKYNNYATYYADSVKD

SEQ ID NO: 2070 - DNA, 57 bp, Artificial Sequence; identical to SEQ ID NO: 6
  Description of Artificial Sequence: Synthetic Heavy chain variable region CDR H2 nucleic acid sequence

SEQ ID NO: 2071 - protein, 16 aa, Artificial Sequence
  Description of Artificial Sequence: Synthetic Heavy chain variable region CDR H3 amino acid sequence
VRHSNFGNSYVSWFAH

SEQ ID NO: 2072 - DNA, 48 bp, Artificial Sequence; identical to SEQ ID NO: 152
  Description of Artificial Sequence: Synthetic Heavy chain variable region CDR H3 nucleic acid sequence

SEQ ID NO: 2073 - DNA, 327 bp, Artificial Sequence; identical to SEQ ID NO: 1673
  Description of Artificial Sequence: Synthetic Light chain variable region nucleic acid sequence

SEQ ID NO: 2074 - protein, 109 aa, Artificial Sequence; identical to SEQ ID NO: 1674
  Description of Artificial Sequence: Synthetic Light chain variable region amino acid sequence

SEQ ID NO: 2075 - protein, 14 aa, Artificial Sequence
  Description of Artificial Sequence: Synthetic Light chain variable region CDR L1 amino acid sequence
GSSTGAVTTSNYAN

SEQ ID NO: 2076 - DNA, 42 bp, Artificial Sequence; identical to SEQ ID NO: 204
  Description of Artificial Sequence: Synthetic Light chain variable region CDR L1 nucleic acid sequence

SEQ ID NO: 2077 - protein, 7 aa, Artificial Sequence
  Description of Artificial Sequence: Synthetic Light chain variable region CDR L2 amino acid sequence
GTDKRAP

SEQ ID NO: 2078 - DNA, 21 bp, Artificial Sequence
  Description of Artificial Sequence: Synthetic Light chain variable region CDR L2 nucleic acid sequence
ggcacagacaagcgcgctcct

SEQ ID NO: 2079 - protein, 9 aa, Artificial Sequence
  Description of Artificial Sequence: Synthetic Light chain variable region CDR L3 amino acid sequence
ALWYSNLWV

SEQ ID NO: 2080 - DNA, 27 bp, Artificial Sequence
  Description of Artificial Sequence: Synthetic Light chain variable region CDR L3 nucleic acid sequence
gcgctgtggtacagtaacctttgggtg

SEQ ID NO: 2081 - DNA, 375 bp, Artificial Sequence; identical to SEQ ID NO: 145
  Description of Artificial Sequence: Synthetic Heavy chain variable region nucleic acid sequence

SEQ ID NO: 2082 - protein, 125 aa, Artificial Sequence; identical to SEQ ID NO: 146
  Description of Artificial Sequence: Synthetic Heavy chain variable region amino acid sequence

SEQ ID NO: 2083 - protein, 9 aa, Artificial Sequence
  Description of Artificial Sequence: Synthetic Heavy chain variable region CDR H1 amino acid sequence
FTFDTYAMN

SEQ ID NO: 2084 - DNA, 27 bp, Artificial Sequence
  Description of Artificial Sequence: Synthetic Heavy chain variable region CDR H1 nucleic acid sequence
ttcacctttgacacatatgccatgaat

SEQ ID NO: 2085 - protein, 19 aa, Artificial Sequence
  Description of Artificial Sequence: Synthetic Heavy chain variable region CDR H2 amino acid sequence
RIRSKYNNYATYYADSVKD

SEQ ID NO: 2086 - DNA, 57 bp, Artificial Sequence; identical to SEQ ID NO: 6
  Description of Artificial Sequence: Synthetic Heavy chain variable region CDR H2 nucleic acid sequence

SEQ ID NO: 2087 - protein, 16 aa, Artificial Sequence
  Description of Artificial Sequence: Synthetic Heavy chain variable region CDR H3 amino acid sequence
VRHSNFGNSYVSWFAH

SEQ ID NO: 2088 - DNA, 48 bp, Artificial Sequence; identical to SEQ ID NO: 152
  Description of Artificial Sequence: Synthetic Heavy chain variable region CDR H3 nucleic acid sequence

SEQ ID NO: 2089 - DNA, 327 bp, Artificial Sequence; identical to SEQ ID NO: 1689
  Description of Artificial Sequence: Synthetic Light chain variable region nucleic acid sequence

SEQ ID NO: 2090 - protein, 109 aa, Artificial Sequence; identical to SEQ ID NO: 1690
  Description of Artificial Sequence: Synthetic Light chain variable region amino acid sequence

SEQ ID NO: 2091 - protein, 14 aa, Artificial Sequence
  Description of Artificial Sequence: Synthetic Light chain variable region CDR L1 amino acid sequence
GSSTGAVTTSNYAN

SEQ ID NO: 2092 - DNA, 42 bp, Artificial Sequence; identical to SEQ ID NO: 204
  Description of Artificial Sequence: Synthetic Light chain variable region CDR L1 nucleic acid sequence

SEQ ID NO: 2093 - protein, 7 aa, Artificial Sequence
  Description of Artificial Sequence: Synthetic Light chain variable region CDR L2 amino acid sequence
GTDKRAP

SEQ ID NO: 2094 - DNA, 21 bp, Artificial Sequence
  Description of Artificial Sequence: Synthetic Light chain variable region CDR L2 nucleic acid sequence
ggcacagacaagcgcgctcct

SEQ ID NO: 2095 - protein, 9 aa, Artificial Sequence
  Description of Artificial Sequence: Synthetic Light chain variable region CDR L3 amino acid sequence
ALWYSNLWV

SEQ ID NO: 2096 - DNA, 27 bp, Artificial Sequence
  Description of Artificial Sequence: Synthetic Light chain variable region CDR L3 nucleic acid sequence
gcgctgtggtacagtaacctttgggtg

SEQ ID NO: 2097 - DNA, 375 bp, Artificial Sequence; identical to SEQ ID NO: 145
  Description of Artificial Sequence: Synthetic Heavy chain variable region nucleic acid sequence

SEQ ID NO: 2098 - protein, 125 aa, Artificial Sequence; identical to SEQ ID NO: 146
  Description of Artificial Sequence: Synthetic Heavy chain variable region amino acid sequence

SEQ ID NO: 2099 - protein, 9 aa, Artificial Sequence
  Description of Artificial Sequence: Synthetic Heavy chain variable region CDR H1 amino acid sequence
FTFDTYAMN

SEQ ID NO: 2100 - DNA, 27 bp, Artificial Sequence
  Description of Artificial Sequence: Synthetic Heavy chain variable region CDR H1 nucleic acid sequence
ttcacctttgacacatatgccatgaat

SEQ ID NO: 2101 - protein, 19 aa, Artificial Sequence
  Description of Artificial Sequence: Synthetic Heavy chain variable region CDR H2 amino acid sequence
RIRSKYNNYATYYADSVKD

SEQ ID NO: 2102 - DNA, 57 bp, Artificial Sequence; identical to SEQ ID NO: 6
  Description of Artificial Sequence: Synthetic Heavy chain variable region CDR H2 nucleic acid sequence

SEQ ID NO: 2103 - protein, 16 aa, Artificial Sequence
  Description of Artificial Sequence: Synthetic Heavy chain variable region CDR H3 amino acid sequence
VRHSNFGNSYVSWFAH

SEQ ID NO: 2104 - DNA, 48 bp, Artificial Sequence; identical to SEQ ID NO: 152
  Description of Artificial Sequence: Synthetic Heavy chain variable region CDR H3 nucleic acid sequence

SEQ ID NO: 2105 - DNA, 327 bp, Artificial Sequence; identical to SEQ ID NO: 1705
  Description of Artificial Sequence: Synthetic Light chain variable region nucleic acid sequence

SEQ ID NO: 2106 - protein, 109 aa, Artificial Sequence; identical to SEQ ID NO: 1706
  Description of Artificial Sequence: Synthetic Light chain variable region amino acid sequence

SEQ ID NO: 2107 - protein, 14 aa, Artificial Sequence
  Description of Artificial Sequence: Synthetic Light chain variable region CDR L1 amino acid sequence
GSSTGAVTTSNYAN

SEQ ID NO: 2108 - DNA, 42 bp, Artificial Sequence; identical to SEQ ID NO: 204
  Description of Artificial Sequence: Synthetic Light chain variable region CDR L1 nucleic acid sequence

SEQ ID NO: 2109 - protein, 7 aa, Artificial Sequence
  Description of Artificial Sequence: Synthetic Light chain variable region CDR L2 amino acid sequence
GTDKRAP

SEQ ID NO: 2110 - DNA, 21 bp, Artificial Sequence
  Description of Artificial Sequence: Synthetic Light chain variable region CDR L2 nucleic acid sequence
ggcacagacaagcgcgctcct

SEQ ID NO: 2111 - protein, 9 aa, Artificial Sequence
  Description of Artificial Sequence: Synthetic Light chain variable region CDR L3 amino acid sequence
VLWYSNLWV

SEQ ID NO: 2112 - DNA, 27 bp, Artificial Sequence
  Description of Artificial Sequence: Synthetic Light chain variable region CDR L3 nucleic acid sequence
gtgctgtggtacagtaacctttgggtg

SEQ ID NO: 2113 - DNA, 375 bp, Artificial Sequence; identical to SEQ ID NO: 145
  Description of Artificial Sequence: Synthetic Heavy chain variable region nucleic acid sequence

SEQ ID NO: 2114 - protein, 125 aa, Artificial Sequence; identical to SEQ ID NO: 146
  Description of Artificial Sequence: Synthetic Heavy chain variable region amino acid sequence

SEQ ID NO: 2115 - protein, 9 aa, Artificial Sequence
  Description of Artificial Sequence: Synthetic Heavy chain variable region CDR H1 amino acid sequence
FTFDTYAMN

SEQ ID NO: 2116 - DNA, 27 bp, Artificial Sequence
  Description of Artificial Sequence: Synthetic Heavy chain variable region CDR H1 nucleic acid sequence
ttcacctttgacacatatgccatgaat

SEQ ID NO: 2117 - protein, 19 aa, Artificial Sequence
  Description of Artificial Sequence: Synthetic Heavy chain variable region CDR H2 amino acid sequence
RIRSKYNNYATYYADSVKD

SEQ ID NO: 2118 - DNA, 57 bp, Artificial Sequence; identical to SEQ ID NO: 6
  Description of Artificial Sequence: Synthetic Heavy chain variable region CDR H2 nucleic acid sequence

SEQ ID NO: 2119 - protein, 16 aa, Artificial Sequence
  Description of Artificial Sequence: Synthetic Heavy chain variable region CDR H3 amino acid sequence
VRHSNFGNSYVSWFAH

SEQ ID NO: 2120 - DNA, 48 bp, Artificial Sequence; identical to SEQ ID NO: 152
  Description of Artificial Sequence: Synthetic Heavy chain variable region CDR H3 nucleic acid sequence

SEQ ID NO: 2121 - DNA, 327 bp, Artificial Sequence; identical to SEQ ID NO: 201
  Description of Artificial Sequence: Synthetic Light chain variable region nucleic acid sequence

SEQ ID NO: 2122 - protein, 109 aa, Artificial Sequence; identical to SEQ ID NO: 202
  Description of Artificial Sequence: Synthetic Light chain variable region amino acid sequence

SEQ ID NO: 2123 - protein, 14 aa, Artificial Sequence
  Description of Artificial Sequence: Synthetic Light chain variable region CDR L1 amino acid sequence
GSSTGAVTTSNYAN

SEQ ID NO: 2124 - DNA, 42 bp, Artificial Sequence; identical to SEQ ID NO: 204
  Description of Artificial Sequence: Synthetic Light chain variable region CDR L1 nucleic acid sequence

SEQ ID NO: 2125 - protein, 7 aa, Artificial Sequence
  Description of Artificial Sequence: Synthetic Light chain variable region CDR L2 amino acid sequence
GTDKRAP

SEQ ID NO: 2126 - DNA, 21 bp, Artificial Sequence
  Description of Artificial Sequence: Synthetic Light chain variable region CDR L2 nucleic acid sequence
ggcacagacaagcgcgctcct

SEQ ID NO: 2127 - protein, 9 aa, Artificial Sequence
  Description of Artificial Sequence: Synthetic Light chain variable region CDR L3 amino acid sequence
ALWYSNHWV

SEQ ID NO: 2128 - DNA, 27 bp, Artificial Sequence
  Description of Artificial Sequence: Synthetic Light chain variable region CDR L3 nucleic acid sequence
gcgctgtggtacagtaaccattgggtg

SEQ ID NO: 2129 - DNA, 375 bp, Artificial Sequence; identical to SEQ ID NO: 145
  Description of Artificial Sequence: Synthetic Heavy chain variable region nucleic acid sequence

SEQ ID NO: 2130 - protein, 125 aa, Artificial Sequence; identical to SEQ ID NO: 146
  Description of Artificial Sequence: Synthetic Heavy chain variable region amino acid sequence

SEQ ID NO: 2131 - protein, 9 aa, Artificial Sequence
  Description of Artificial Sequence: Synthetic Heavy chain variable region CDR H1 amino acid sequence
FTFDTYAMN

SEQ ID NO: 2132 - DNA, 27 bp, Artificial Sequence
  Description of Artificial Sequence: Synthetic Heavy chain variable region CDR H1 nucleic acid sequence
ttcacctttgacacatatgccatgaat

SEQ ID NO: 2133 - protein, 19 aa, Artificial Sequence
  Description of Artificial Sequence: Synthetic Heavy chain variable region CDR H2 amino acid sequence
RIRSKYNNYATYYADSVKD

SEQ ID NO: 2134 - DNA, 57 bp, Artificial Sequence; identical to SEQ ID NO: 6
  Description of Artificial Sequence: Synthetic Heavy chain variable region CDR H2 nucleic acid sequence

SEQ ID NO: 2135 - protein, 16 aa, Artificial Sequence
  Description of Artificial Sequence: Synthetic Heavy chain variable region CDR H3 amino acid sequence
VRHSNFGNSYVSWFAH

SEQ ID NO: 2136 - DNA, 48 bp, Artificial Sequence; identical to SEQ ID NO: 152
  Description of Artificial Sequence: Synthetic Heavy chain variable region CDR H3 nucleic acid sequence

SEQ ID NO: 2137 - DNA, 327 bp, Artificial Sequence; identical to SEQ ID NO: 1721
  Description of Artificial Sequence: Synthetic Light chain variable region nucleic acid sequence

SEQ ID NO: 2138 - protein, 109 aa, Artificial Sequence; identical to SEQ ID NO: 1722
  Description of Artificial Sequence: Synthetic Light chain variable region amino acid sequence

SEQ ID NO: 2139 - protein, 14 aa, Artificial Sequence
  Description of Artificial Sequence: Synthetic Light chain variable region CDR L1 amino acid sequence
GSSTGAVTTSNYAN

SEQ ID NO: 2140 - DNA, 42 bp, Artificial Sequence; identical to SEQ ID NO: 204
  Description of Artificial Sequence: Synthetic Light chain variable region CDR L1 nucleic acid sequence

SEQ ID NO: 2141 - protein, 7 aa, Artificial Sequence
  Description of Artificial Sequence: Synthetic Light chain variable region CDR L2 amino acid sequence
GTDKRAP

SEQ ID NO: 2142 - DNA, 21 bp, Artificial Sequence
  Description of Artificial Sequence: Synthetic Light chain variable region CDR L2 nucleic acid sequence
ggcacagacaagcgcgctcct

SEQ ID NO: 2143 - protein, 9 aa, Artificial Sequence
  Description of Artificial Sequence: Synthetic Light chain variable region CDR L3 amino acid sequence
ALWYSNLWV

SEQ ID NO: 2144 - DNA, 27 bp, Artificial Sequence
  Description of Artificial Sequence: Synthetic Light chain variable region CDR L3 nucleic acid sequence
gcgctgtggtacagtaacctttgggtg

SEQ ID NO: 2145 - DNA, 375 bp, Artificial Sequence; identical to SEQ ID NO: 145
  Description of Artificial Sequence: Synthetic Heavy chain variable region nucleic acid sequence

SEQ ID NO: 2146 - protein, 125 aa, Artificial Sequence; identical to SEQ ID NO: 146
  Description of Artificial Sequence: Synthetic Heavy chain variable region amino acid sequence

SEQ ID NO: 2147 - protein, 9 aa, Artificial Sequence
  Description of Artificial Sequence: Synthetic Heavy chain variable region CDR H1 amino acid sequence
FTFDTYAMN

SEQ ID NO: 2148 - DNA, 27 bp, Artificial Sequence
  Description of Artificial Sequence: Synthetic Heavy chain variable region CDR H1 nucleic acid sequence
ttcacctttgacacatatgccatgaat

SEQ ID NO: 2149 - protein, 19 aa, Artificial Sequence
  Description of Artificial Sequence: Synthetic Heavy chain variable region CDR H2 amino acid sequence
RIRSKYNNYATYYADSVKD

SEQ ID NO: 2150 - DNA, 57 bp, Artificial Sequence; identical to SEQ ID NO: 6
  Description of Artificial Sequence: Synthetic Heavy chain variable region CDR H2 nucleic acid sequence

SEQ ID NO: 2151 - protein, 16 aa, Artificial Sequence
  Description of Artificial Sequence: Synthetic Heavy chain variable region CDR H3 amino acid sequence
VRHSNFGNSYVSWFAH

SEQ ID NO: 2152 - DNA, 48 bp, Artificial Sequence; identical to SEQ ID NO: 152
  Description of Artificial Sequence: Synthetic Heavy chain variable region CDR H3 nucleic acid sequence

SEQ ID NO: 2153 - DNA, 327 bp, Artificial Sequence; identical to SEQ ID NO: 1737
  Description of Artificial Sequence: Synthetic Light chain variable region nucleic acid sequence

SEQ ID NO: 2154 - protein, 109 aa, Artificial Sequence; identical to SEQ ID NO: 1738
  Description of Artificial Sequence: Synthetic Light chain variable region amino acid sequence

SEQ ID NO: 2155 - protein, 14 aa, Artificial Sequence
  Description of Artificial Sequence: Synthetic Light chain variable region CDR L1 amino acid sequence
GSSAGAVTTSNYAN

SEQ ID NO: 2156 - DNA, 42 bp, Artificial Sequence; identical to SEQ ID NO: 236
  Description of Artificial Sequence: Synthetic Light chain variable region CDR L1 nucleic acid sequence

SEQ ID NO: 2157 - protein, 7 aa, Artificial Sequence
  Description of Artificial Sequence: Synthetic Light chain variable region CDR L2 amino acid sequence
GTDKRAP

SEQ ID NO: 2158 - DNA, 21 bp, Artificial Sequence
  Description of Artificial Sequence: Synthetic Light chain variable region CDR L2 nucleic acid sequence
ggcacagacaagcgcgctcct

SEQ ID NO: 2159 - protein, 9 aa, Artificial Sequence
  Description of Artificial Sequence: Synthetic Light chain variable region CDR L3 amino acid sequence
ALWYSNLWV

SEQ ID NO: 2160 - DNA, 27 bp, Artificial Sequence
  Description of Artificial Sequence: Synthetic Light chain variable region CDR L3 nucleic acid sequence
gcgctgtggtacagtaacctttgggtg

SEQ ID NO: 2161 - DNA, 375 bp, Artificial Sequence; identical to SEQ ID NO: 145
  Description of Artificial Sequence: Synthetic Heavy chain variable region nucleic acid sequence

SEQ ID NO: 2162 - protein, 125 aa, Artificial Sequence; identical to SEQ ID NO: 146
  Description of Artificial Sequence: Synthetic Heavy chain variable region amino acid sequence

SEQ ID NO: 2163 - protein, 9 aa, Artificial Sequence
  Description of Artificial Sequence: Synthetic Heavy chain variable region CDR H1 amino acid sequence
FTFDTYAMN

SEQ ID NO: 2164 - DNA, 27 bp, Artificial Sequence
  Description of Artificial Sequence: Synthetic Heavy chain variable region CDR H1 nucleic acid sequence
ttcacctttgacacatatgccatgaat

SEQ ID NO: 2165 - protein, 19 aa, Artificial Sequence
  Description of Artificial Sequence: Synthetic Heavy chain variable region CDR H2 amino acid sequence
RIRSKYNNYATYYADSVKD

SEQ ID NO: 2166 - DNA, 57 bp, Artificial Sequence; identical to SEQ ID NO: 6
  Description of Artificial Sequence: Synthetic Heavy chain variable region CDR H2 nucleic acid sequence

SEQ ID NO: 2167 - protein, 16 aa, Artificial Sequence
  Description of Artificial Sequence: Synthetic Heavy chain variable region CDR H3 amino acid sequence
VRHSNFGNSYVSWFAH

SEQ ID NO: 2168 - DNA, 48 bp, Artificial Sequence; identical to SEQ ID NO: 152
  Description of Artificial Sequence: Synthetic Heavy chain variable region CDR H3 nucleic acid sequence

SEQ ID NO: 2169 - DNA, 327 bp, Artificial Sequence; identical to SEQ ID NO: 1753
  Description of Artificial Sequence: Synthetic Light chain variable region nucleic acid sequence

SEQ ID NO: 2170 - protein, 109 aa, Artificial Sequence; identical to SEQ ID NO: 1754
  Description of Artificial Sequence: Synthetic Light chain variable region amino acid sequence

SEQ ID NO: 2171 - protein, 14 aa, Artificial Sequence
  Description of Artificial Sequence: Synthetic Light chain variable region CDR L1 amino acid sequence
GSSTGAVTTSNYAN

SEQ ID NO: 2172 - DNA, 42 bp, Artificial Sequence; identical to SEQ ID NO: 204
  Description of Artificial Sequence: Synthetic Light chain variable region CDR L1 nucleic acid sequence

SEQ ID NO: 2173 - protein, 7 aa, Artificial Sequence
  Description of Artificial Sequence: Synthetic Light chain variable region CDR L2 amino acid sequence
GTDKRAP

SEQ ID NO: 2174 - DNA, 21 bp, Artificial Sequence
  Description of Artificial Sequence: Synthetic Light chain variable region CDR L2 nucleic acid sequence
ggcacagacaagcgcgctcct

SEQ ID NO: 2175 - protein, 9 aa, Artificial Sequence
  Description of Artificial Sequence: Synthetic Light chain variable region CDR L3 amino acid sequence
ALWYSNLWV

SEQ ID NO: 2176 - DNA, 27 bp, Artificial Sequence
  Description of Artificial Sequence: Synthetic Light chain variable region CDR L3 nucleic acid sequence
gcgctgtggtacagtaacctttgggtg

SEQ ID NO: 2177 - DNA, 375 bp, Artificial Sequence; identical to SEQ ID NO: 145
  Description of Artificial Sequence: Synthetic Heavy chain variable region nucleic acid sequence

SEQ ID NO: 2178 - protein, 125 aa, Artificial Sequence; identical to SEQ ID NO: 146
  Description of Artificial Sequence: Synthetic Heavy chain variable region amino acid sequence

SEQ ID NO: 2179 - protein, 9 aa, Artificial Sequence
  Description of Artificial Sequence: Synthetic Heavy chain variable region CDR H1 amino acid sequence
FTFDTYAMN

SEQ ID NO: 2180 - DNA, 27 bp, Artificial Sequence
  Description of Artificial Sequence: Synthetic Heavy chain variable region CDR H1 nucleic acid sequence
ttcacctttgacacatatgccatgaat

SEQ ID NO: 2181 - protein, 19 aa, Artificial Sequence
  Description of Artificial Sequence: Synthetic Heavy chain variable region CDR H2 amino acid sequence
RIRSKYNNYATYYADSVKD

SEQ ID NO: 2182 - DNA, 57 bp, Artificial Sequence; identical to SEQ ID NO: 6
  Description of Artificial Sequence: Synthetic Heavy chain variable region CDR H2 nucleic acid sequence

SEQ ID NO: 2183 - protein, 16 aa, Artificial Sequence
  Description of Artificial Sequence: Synthetic Heavy chain variable region CDR H3 amino acid sequence
VRHSNFGNSYVSWFAH

SEQ ID NO: 2184 - DNA, 48 bp, Artificial Sequence; identical to SEQ ID NO: 152
  Description of Artificial Sequence: Synthetic Heavy chain variable region CDR H3 nucleic acid sequence

SEQ ID NO: 2185 - DNA, 327 bp, Artificial Sequence; identical to SEQ ID NO: 1769
  Description of Artificial Sequence: Synthetic Light chain variable region nucleic acid sequence

SEQ ID NO: 2186 - protein, 109 aa, Artificial Sequence; identical to SEQ ID NO: 1770
  Description of Artificial Sequence: Synthetic Light chain variable region amino acid sequence

SEQ ID NO: 2187 - protein, 14 aa, Artificial Sequence
  Description of Artificial Sequence: Synthetic Light chain variable region CDR L1 amino acid sequence
GSSTGAVTTSNYAN

SEQ ID NO: 2188 - DNA, 42 bp, Artificial Sequence; identical to SEQ ID NO: 204
  Description of Artificial Sequence: Synthetic Light chain variable region CDR L1 nucleic acid sequence

SEQ ID NO: 2189 - protein, 7 aa, Artificial Sequence
  Description of Artificial Sequence: Synthetic Light chain variable region CDR L2 amino acid sequence
GTDKRAP

SEQ ID NO: 2190 - DNA, 21 bp, Artificial Sequence
  Description of Artificial Sequence: Synthetic Light chain variable region CDR L2 nucleic acid sequence
ggcacagacaagcgcgctcct

SEQ ID NO: 2191 - protein, 9 aa, Artificial Sequence
  Description of Artificial Sequence: Synthetic Light chain variable region CDR L3 amino acid sequence
ALWYNNLWV

SEQ ID NO: 2192 - DNA, 27 bp, Artificial Sequence
  Description of Artificial Sequence: Synthetic Light chain variable region CDR L3 nucleic acid sequence
gcgctgtggtacaataacctttgggtg

SEQ ID NO: 2193 - DNA, 375 bp, Artificial Sequence; identical to SEQ ID NO: 145
  Description of Artificial Sequence: Synthetic Heavy chain variable region nucleic acid sequence

SEQ ID NO: 2194 - protein, 125 aa, Artificial Sequence; identical to SEQ ID NO: 146
  Description of Artificial Sequence: Synthetic Heavy chain variable region amino acid sequence

SEQ ID NO: 2195 - protein, 9 aa, Artificial Sequence
  Description of Artificial Sequence: Synthetic Heavy chain variable region CDR H1 amino acid sequence
FTFDTYAMN

SEQ ID NO: 2196 - DNA, 27 bp, Artificial Sequence
  Description of Artificial Sequence: Synthetic Heavy chain variable region CDR H1 nucleic acid sequence
ttcacctttgacacatatgccatgaat

SEQ ID NO: 2197 - protein, 19 aa, Artificial Sequence
  Description of Artificial Sequence: Synthetic Heavy chain variable region CDR H2 amino acid sequence
RIRSKYNNYATYYADSVKD

SEQ ID NO: 2198 - DNA, 57 bp, Artificial Sequence; identical to SEQ ID NO: 6
  Description of Artificial Sequence: Synthetic Heavy chain variable region CDR H2 nucleic acid sequence

SEQ ID NO: 2199 - protein, 16 aa, Artificial Sequence
  Description of Artificial Sequence: Synthetic Heavy chain variable region CDR H3 amino acid sequence
VRHSNFGNSYVSWFAH

SEQ ID NO: 2200 - DNA, 48 bp, Artificial Sequence; identical to SEQ ID NO: 152
  Description of Artificial Sequence: Synthetic Heavy chain variable region CDR H3 nucleic acid sequence

SEQ ID NO: 2201 - DNA, 327 bp, Artificial Sequence; identical to SEQ ID NO: 1785
  Description of Artificial Sequence: Synthetic Light chain variable region nucleic acid sequence

SEQ ID NO: 2202 - protein, 109 aa, Artificial Sequence; identical to SEQ ID NO: 1786
  Description of Artificial Sequence: Synthetic Light chain variable region amino acid sequence

SEQ ID NO: 2203 - protein, 14 aa, Artificial Sequence
  Description of Artificial Sequence: Synthetic Light chain variable region CDR L1 amino acid sequence
GSSTGAVTTSNYAN

SEQ ID NO: 2204 - DNA, 42 bp, Artificial Sequence; identical to SEQ ID NO: 204
  Description of Artificial Sequence: Synthetic Light chain variable region CDR L1 nucleic acid sequence

SEQ ID NO: 2205 - protein, 7 aa, Artificial Sequence
  Description of Artificial Sequence: Synthetic Light chain variable region CDR L2 amino acid sequence
GTDKRAP

SEQ ID NO: 2206 - DNA, 21 bp, Artificial Sequence
  Description of Artificial Sequence: Synthetic Light chain variable region CDR L2 nucleic acid sequence
ggcacagacaagcgcgctcct

SEQ ID NO: 2207 - protein, 9 aa, Artificial Sequence
  Description of Artificial Sequence: Synthetic Light chain variable region CDR L3 amino acid sequence
VLWYSNLWV

SEQ ID NO: 2208 - DNA, 27 bp, Artificial Sequence
  Description of Artificial Sequence: Synthetic Light chain variable region CDR L3 nucleic acid sequence
gtgctgtggtacagtaacctttgggtg

SEQ ID NO: 2209 - DNA, 375 bp, Artificial Sequence; identical to SEQ ID NO: 145
  Description of Artificial Sequence: Synthetic Heavy chain variable region nucleic acid sequence

SEQ ID NO: 2210 - protein, 125 aa, Artificial Sequence; identical to SEQ ID NO: 146
  Description of Artificial Sequence: Synthetic Heavy chain variable region amino acid sequence

SEQ ID NO: 2211 - protein, 9 aa, Artificial Sequence
  Description of Artificial Sequence: Synthetic Heavy chain variable region CDR H1 amino acid sequence
FTFDTYAMN

SEQ ID NO: 2212 - DNA, 27 bp, Artificial Sequence
  Description of Artificial Sequence: Synthetic Heavy chain variable region CDR H1 nucleic acid sequence
ttcacctttgacacatatgccatgaat

SEQ ID NO: 2213 - protein, 19 aa, Artificial Sequence
  Description of Artificial Sequence: Synthetic Heavy chain variable region CDR H2 amino acid sequence
RIRSKYNNYATYYADSVKD

SEQ ID NO: 2214 - DNA, 57 bp, Artificial Sequence; identical to SEQ ID NO: 6
  Description of Artificial Sequence: Synthetic Heavy chain variable region CDR H2 nucleic acid sequence

SEQ ID NO: 2215 - protein, 16 aa, Artificial Sequence
  Description of Artificial Sequence: Synthetic Heavy chain variable region CDR H3 amino acid sequence
VRHSNFGNSYVSWFAH

SEQ ID NO: 2216 - DNA, 48 bp, Artificial Sequence; identical to SEQ ID NO: 152
  Description of Artificial Sequence: Synthetic Heavy chain variable region CDR H3 nucleic acid sequence

SEQ ID NO: 2217 - DNA, 327 bp, Artificial Sequence; identical to SEQ ID NO: 217
  Description of Artificial Sequence: Synthetic Light chain variable region nucleic acid sequence

SEQ ID NO: 2218 - protein, 109 aa, Artificial Sequence; identical to SEQ ID NO: 218
  Description of Artificial Sequence: Synthetic Light chain variable region amino acid sequence

SEQ ID NO: 2219 - protein, 14 aa, Artificial Sequence
  Description of Artificial Sequence: Synthetic Light chain variable region CDR L1 amino acid sequence
GSSTGAVTTSNYAN

SEQ ID NO: 2220 - DNA, 42 bp, Artificial Sequence; identical to SEQ ID NO: 204
  Description of Artificial Sequence: Synthetic Light chain variable region CDR L1 nucleic acid sequence

SEQ ID NO: 2221 - protein, 7 aa, Artificial Sequence
  Description of Artificial Sequence: Synthetic Light chain variable region CDR L2 amino acid sequence
GTDKRAP

SEQ ID NO: 2222 - DNA, 21 bp, Artificial Sequence
  Description of Artificial Sequence: Synthetic Light chain variable region CDR L2 nucleic acid sequence
ggcacagacaagcgcgctcct

SEQ ID NO: 2223 - protein, 9 aa, Artificial Sequence
  Description of Artificial Sequence: Synthetic Light chain variable region CDR L3 amino acid sequence
ALWYSNHWV

SEQ ID NO: 2224 - DNA, 27 bp, Artificial Sequence
  Description of Artificial Sequence: Synthetic Light chain variable region CDR L3 nucleic acid sequence
gcgctgtggtacagtaaccattgggtg

SEQ ID NO: 2225 - DNA, 375 bp, Artificial Sequence; identical to SEQ ID NO: 145
  Description of Artificial Sequence: Synthetic Heavy chain variable region nucleic acid sequence

SEQ ID NO: 2226 - protein, 125 aa, Artificial Sequence; identical to SEQ ID NO: 146
  Description of Artificial Sequence: Synthetic Heavy chain variable region amino acid sequence

SEQ ID NO: 2227 - protein, 9 aa, Artificial Sequence
  Description of Artificial Sequence: Synthetic Heavy chain variable region CDR H1 amino acid sequence
FTFDTYAMN

SEQ ID NO: 2228 - DNA, 27 bp, Artificial Sequence
  Description of Artificial Sequence: Synthetic Heavy chain variable region CDR H1 nucleic acid sequence
ttcacctttgacacatatgccatgaat

SEQ ID NO: 2229 - protein, 19 aa, Artificial Sequence
  Description of Artificial Sequence: Synthetic Heavy chain variable region CDR H2 amino acid sequence
RIRSKYNNYATYYADSVKD

SEQ ID NO: 2230 - DNA, 57 bp, Artificial Sequence; identical to SEQ ID NO: 6
  Description of Artificial Sequence: Synthetic Heavy chain variable region CDR H2 nucleic acid sequence

SEQ ID NO: 2231 - protein, 16 aa, Artificial Sequence
  Description of Artificial Sequence: Synthetic Heavy chain variable region CDR H3 amino acid sequence
VRHSNFGNSYVSWFAH

SEQ ID NO: 2232 - DNA, 48 bp, Artificial Sequence; identical to SEQ ID NO: 152
  Description of Artificial Sequence: Synthetic Heavy chain variable region CDR H3 nucleic acid sequence

SEQ ID NO: 2233 - DNA, 327 bp, Artificial Sequence; identical to SEQ ID NO: 1801
  Description of Artificial Sequence: Synthetic Light chain variable region nucleic acid sequence

SEQ ID NO: 2234 - protein, 109 aa, Artificial Sequence; identical to SEQ ID NO: 1802
  Description of Artificial Sequence: Synthetic Light chain variable region amino acid sequence

SEQ ID NO: 2235 - protein, 14 aa, Artificial Sequence
  Description of Artificial Sequence: Synthetic Light chain variable region CDR L1 amino acid sequence
GSSAGAVTTSNYAN

SEQ ID NO: 2236 - DNA, 42 bp, Artificial Sequence; identical to SEQ ID NO: 236
  Description of Artificial Sequence: Synthetic Light chain variable region CDR L1 nucleic acid sequence

SEQ ID NO: 2237 - protein, 7 aa, Artificial Sequence
  Description of Artificial Sequence: Synthetic Light chain variable region CDR L2 amino acid sequence
GTDKRAP

SEQ ID NO: 2238 - DNA, 21 bp, Artificial Sequence
  Description of Artificial Sequence: Synthetic Light chain variable region CDR L2 nucleic acid sequence
ggcacagacaagcgcgctcct

SEQ ID NO: 2239 - protein, 9 aa, Artificial Sequence
  Description of Artificial Sequence: Synthetic Light chain variable region CDR L3 amino acid sequence
ALWYSNLWV

SEQ ID NO: 2240 - DNA, 27 bp, Artificial Sequence
  Description of Artificial Sequence: Synthetic Light chain variable region CDR L3 nucleic acid sequence
gcgctgtggtacagtaacctttgggtg

SEQ ID NO: 2241 - DNA, 375 bp, Artificial Sequence; identical to SEQ ID NO: 145
  Description of Artificial Sequence: Synthetic Heavy chain variable region nucleic acid sequence

SEQ ID NO: 2242 - protein, 125 aa, Artificial Sequence; identical to SEQ ID NO: 146
  Description of Artificial Sequence: Synthetic Heavy chain variable region amino acid sequence

SEQ ID NO: 2243 - protein, 9 aa, Artificial Sequence
  Description of Artificial Sequence: Synthetic Heavy chain variable region CDR H1 amino acid sequence
FTFDTYAMN

SEQ ID NO: 2244 - DNA, 27 bp, Artificial Sequence
  Description of Artificial Sequence: Synthetic Heavy chain variable region CDR H1 nucleic acid sequence
ttcacctttgacacatatgccatgaat

SEQ ID NO: 2245 - protein, 19 aa, Artificial Sequence
  Description of Artificial Sequence: Synthetic Heavy chain variable region CDR H2 amino acid sequence
RIRSKYNNYATYYADSVKD

SEQ ID NO: 2246 - DNA, 57 bp, Artificial Sequence; identical to SEQ ID NO: 6
  Description of Artificial Sequence: Synthetic Heavy chain variable region CDR H2 nucleic acid sequence

SEQ ID NO: 2247 - protein, 16 aa, Artificial Sequence
  Description of Artificial Sequence: Synthetic Heavy chain variable region CDR H3 amino acid sequence
VRHSNFGNSYVSWFAH

SEQ ID NO: 2248 - DNA, 48 bp, Artificial Sequence; identical to SEQ ID NO: 152
  Description of Artificial Sequence: Synthetic Heavy chain variable region CDR H3 nucleic acid sequence

SEQ ID NO: 2249 - DNA, 327 bp, Artificial Sequence; identical to SEQ ID NO: 1817
  Description of Artificial Sequence: Synthetic Light chain variable region nucleic acid sequence

SEQ ID NO: 2250 - protein, 109 aa, Artificial Sequence; identical to SEQ ID NO: 1818
  Description of Artificial Sequence: Synthetic Light chain variable region amino acid sequence

SEQ ID NO: 2251 - protein, 14 aa, Artificial Sequence
  Description of Artificial Sequence: Synthetic Light chain variable region CDR L1 amino acid sequence
GSSTGAVTTSNYAN

SEQ ID NO: 2252 - DNA, 42 bp, Artificial Sequence; identical to SEQ ID NO: 204
  Description of Artificial Sequence: Synthetic Light chain variable region CDR L1 nucleic acid sequence

SEQ ID NO: 2253 - protein, 7 aa, Artificial Sequence
  Description of Artificial Sequence: Synthetic Light chain variable region CDR L2 amino acid sequence
GTDKRAP

SEQ ID NO: 2254 - DNA, 21 bp, Artificial Sequence
  Description of Artificial Sequence: Synthetic Light chain variable region CDR L2 nucleic acid sequence
ggcacagacaagcgcgctcct

SEQ ID NO: 2255 - protein, 9 aa, Artificial Sequence
  Description of Artificial Sequence: Synthetic Light chain variable region CDR L3 amino acid sequence
ALWYNNLWV

SEQ ID NO: 2256 - DNA, 27 bp, Artificial Sequence
  Description of Artificial Sequence: Synthetic Light chain variable region CDR L3 nucleic acid sequence
gcgctgtggtacaataacctttgggtg

SEQ ID NO: 2257 - DNA, 375 bp, Artificial Sequence; identical to SEQ ID NO: 145
  Description of Artificial Sequence: Synthetic Heavy chain variable region nucleic acid sequence

SEQ ID NO: 2258 - protein, 125 aa, Artificial Sequence; identical to SEQ ID NO: 146
  Description of Artificial Sequence: Synthetic Heavy chain variable region amino acid sequence

SEQ ID NO: 2259 - protein, 9 aa, Artificial Sequence
  Description of Artificial Sequence: Synthetic Heavy chain variable region CDR H1 amino acid sequence
FTFDTYAMN

SEQ ID NO: 2260 - DNA, 27 bp, Artificial Sequence
  Description of Artificial Sequence: Synthetic Heavy chain variable region CDR H1 nucleic acid sequence
ttcacctttgacacatatgccatgaat

SEQ ID NO: 2261 - protein, 19 aa, Artificial Sequence
  Description of Artificial Sequence: Synthetic Heavy chain variable region CDR H2 amino acid sequence
RIRSKYNNYATYYADSVKD

SEQ ID NO: 2262 - DNA, 57 bp, Artificial Sequence; identical to SEQ ID NO: 6
  Description of Artificial Sequence: Synthetic Heavy chain variable region CDR H2 nucleic acid sequence

SEQ ID NO: 2263 - protein, 16 aa, Artificial Sequence
  Description of Artificial Sequence: Synthetic Heavy chain variable region CDR H3 amino acid sequence
VRHSNFGNSYVSWFAH

SEQ ID NO: 2264 - DNA, 48 bp, Artificial Sequence; identical to SEQ ID NO: 152
  Description of Artificial Sequence: Synthetic Heavy chain variable region CDR H3 nucleic acid sequence

SEQ ID NO: 2265 - DNA, 327 bp, Artificial Sequence; identical to SEQ ID NO: 1833
  Description of Artificial Sequence: Synthetic Light chain variable region nucleic acid sequence

SEQ ID NO: 2266 - protein, 109 aa, Artificial Sequence; identical to SEQ ID NO: 1834
  Description of Artificial Sequence: Synthetic Light chain variable region amino acid sequence

SEQ ID NO: 2267 - protein, 14 aa, Artificial Sequence
  Description of Artificial Sequence: Synthetic Light chain variable region CDR L1 amino acid sequence
GSSTGAVTTSNYAN

SEQ ID NO: 2268 - DNA, 42 bp, Artificial Sequence; identical to SEQ ID NO: 204
  Description of Artificial Sequence: Synthetic Light chain variable region CDR L1 nucleic acid sequence

SEQ ID NO: 2269 - protein, 7 aa, Artificial Sequence
  Description of Artificial Sequence: Synthetic Light chain variable region CDR L2 amino acid sequence
GTDKRAP

SEQ ID NO: 2270 - DNA, 21 bp, Artificial Sequence
  Description of Artificial Sequence: Synthetic Light chain variable region CDR L2 nucleic acid sequence
ggcacagacaagcgcgctcct

SEQ ID NO: 2271 - protein, 9 aa, Artificial Sequence
  Description of Artificial Sequence: Synthetic Light chain variable region CDR L3 amino acid sequence
VLWYSNLWV

SEQ ID NO: 2272 - DNA, 27 bp, Artificial Sequence
  Description of Artificial Sequence: Synthetic Light chain variable region CDR L3 nucleic acid sequence
gtgctgtggtacagtaacctttgggtg

SEQ ID NO: 2273 - DNA, 375 bp, Artificial Sequence; identical to SEQ ID NO: 145
  Description of Artificial Sequence: Synthetic Heavy chain variable region nucleic acid sequence

SEQ ID NO: 2274 - protein, 125 aa, Artificial Sequence; identical to SEQ ID NO: 146
  Description of Artificial Sequence: Synthetic Heavy chain variable region amino acid sequence

SEQ ID NO: 2275 - protein, 9 aa, Artificial Sequence
  Description of Artificial Sequence: Synthetic Heavy chain variable region CDR H1 amino acid sequence
FTFDTYAMN

SEQ ID NO: 2276 - DNA, 27 bp, Artificial Sequence
  Description of Artificial Sequence: Synthetic Heavy chain variable region CDR H1 nucleic acid sequence
ttcacctttgacacatatgccatgaat

SEQ ID NO: 2277 - protein, 19 aa, Artificial Sequence
  Description of Artificial Sequence: Synthetic Heavy chain variable region CDR H2 amino acid sequence
RIRSKYNNYATYYADSVKD

SEQ ID NO: 2278 - DNA, 57 bp, Artificial Sequence; identical to SEQ ID NO: 6
  Description of Artificial Sequence: Synthetic Heavy chain variable region CDR H2 nucleic acid sequence

SEQ ID NO: 2279 - protein, 16 aa, Artificial Sequence
  Description of Artificial Sequence: Synthetic Heavy chain variable region CDR H3 amino acid sequence
VRHSNFGNSYVSWFAH

SEQ ID NO: 2280 - DNA, 48 bp, Artificial Sequence; identical to SEQ ID NO: 152
  Description of Artificial Sequence: Synthetic Heavy chain variable region CDR H3 nucleic acid sequence

SEQ ID NO: 2281 - DNA, 327 bp, Artificial Sequence
  Description of Artificial Sequence: Synthetic Light chain variable region nucleic acid sequence
cagactgtggtgacccaggagccatcgctctcagtgtcccctggagggacagtcacactcacttgtggatcaagcactggcgcagtcactactagtaactacgccaactgggtccagcagaccccaggccaggctccgcgcggactcatcggcggcacagacaagcgcgctcctggggtccctgatcgcttctctggctccctgcttggggacaaagctgccctcaccatcacgggggcccaggcagatgatgaagctgattattactgtgcgctgtggtacagtaaccattgggtgttcggcggagggaccaagctgaccgtccta

SEQ ID NO: 2282 - protein, 109 aa, Artificial Sequence
  Description of Artificial Sequence: Synthetic Light chain variable region amino acid sequence
QTVVTQEPSLSVSPGGTVTLTCGSSTGAVTTSNYANWVQQTPGQAPRGLIGGTDKRAPGVPDRFSGSLLGDKAALTITGAQADDEADYYCALWYSNHWVFGGGTKLTVL

SEQ ID NO: 2283 - protein, 14 aa, Artificial Sequence
  Description of Artificial Sequence: Synthetic Light chain variable region CDR L1 amino acid sequence
GSSTGAVTTSNYAN

SEQ ID NO: 2284 - DNA, 42 bp, Artificial Sequence; identical to SEQ ID NO: 204
  Description of Artificial Sequence: Synthetic Light chain variable region CDR L1 nucleic acid sequence

SEQ ID NO: 2285 - protein, 7 aa, Artificial Sequence
  Description of Artificial Sequence: Synthetic Light chain variable region CDR L2 amino acid sequence
GTDKRAP

SEQ ID NO: 2286 - DNA, 21 bp, Artificial Sequence
  Description of Artificial Sequence: Synthetic Light chain variable region CDR L2 nucleic acid sequence
ggcacagacaagcgcgctcct

SEQ ID NO: 2287 - protein, 9 aa, Artificial Sequence
  Description of Artificial Sequence: Synthetic Light chain variable region CDR L3 amino acid sequence
ALWYSNHWV

SEQ ID NO: 2288 - DNA, 27 bp, Artificial Sequence
  Description of Artificial Sequence: Synthetic Light chain variable region CDR L3 nucleic acid sequence
gcgctgtggtacagtaaccattgggtg

SEQ ID NO: 2289 - DNA, 375 bp, Artificial Sequence; identical to SEQ ID NO: 17
  Description of Artificial Sequence: Synthetic Heavy chain variable region nucleic acid sequence

SEQ ID NO: 2290 - protein, 125 aa, Artificial Sequence; identical to SEQ ID NO: 18
  Description of Artificial Sequence: Synthetic Heavy chain variable region amino acid sequence

SEQ ID NO: 2291 - protein, 9 aa, Artificial Sequence
  Description of Artificial Sequence: Synthetic Heavy chain variable region CDR H1 amino acid sequence
FTFDTYAMN

SEQ ID NO: 2292 - DNA, 27 bp, Artificial Sequence
  Description of Artificial Sequence: Synthetic Heavy chain variable region CDR H1 nucleic acid sequence
ttcacctttgacacatatgccatgaat

SEQ ID NO: 2293 - protein, 19 aa, Artificial Sequence
  Description of Artificial Sequence: Synthetic Heavy chain variable region CDR H2 amino acid sequence
RIRSKYNNYATYYADSVKD

SEQ ID NO: 2294 - DNA, 57 bp, Artificial Sequence; identical to SEQ ID NO: 6
  Description of Artificial Sequence: Synthetic Heavy chain variable region CDR H2 nucleic acid sequence

SEQ ID NO: 2295 - protein, 16 aa, Artificial Sequence
  Description of Artificial Sequence: Synthetic Heavy chain variable region CDR H3 amino acid sequence
VRHGNFGNGYVSWFAH

SEQ ID NO: 2296 - DNA, 48 bp, Artificial Sequence; identical to SEQ ID NO: 24
  Description of Artificial Sequence: Synthetic Heavy chain variable region CDR H3 nucleic acid sequence

SEQ ID NO: 2297 - DNA, 327 bp, Artificial Sequence
  Description of Artificial Sequence: Synthetic Light chain variable region nucleic acid sequence
cagactgtggtgacccaggagccatcgctctcagtgtcccctggagggacagtcacactcacttgtggatcaagcactggcgcagtcactactagtaactacgccaactgggtccagcagaccccaggccaggctccgcgcggactcatcggcggcacagacaagcgcgctcctggggtccctgatcgcttctctggctccctgcttggggacaaagctgccctcatcatcacgggggtccaggcagatgatgaagctgattattactgtgcgctgtggtacagtaacctttgggtgttcggcggagggaccaagctgaccgtccta

SEQ ID NO: 2298 - protein, 109 aa, Artificial Sequence
  Description of Artificial Sequence: Synthetic Light chain variable region amino acid sequence
QTVVTQEPSLSVSPGGTVTLTCGSSTGAVTTSNYANWVQQTPGQAPRGLIGGTDKRAPGVPDRFSGSLLGDKAALIITGVQADDEADYYCALWYSNLWVFGGGTKLTVL

SEQ ID NO: 2299 - protein, 14 aa, Artificial Sequence
  Description of Artificial Sequence: Synthetic Light chain variable region CDR L1 amino acid sequence
GSSTGAVTTSNYAN

SEQ ID NO: 2300 - DNA, 42 bp, Artificial Sequence; identical to SEQ ID NO: 204
  Description of Artificial Sequence: Synthetic Light chain variable region CDR L1 nucleic acid sequence

SEQ ID NO: 2301 - protein, 7 aa, Artificial Sequence
  Description of Artificial Sequence: Synthetic Light chain variable region CDR L2 amino acid sequence
GTDKRAP

SEQ ID NO: 2302 - DNA, 21 bp, Artificial Sequence
  Description of Artificial Sequence: Synthetic Light chain variable region CDR L2 nucleic acid sequence
ggcacagacaagcgcgctcct

SEQ ID NO: 2303 - protein, 9 aa, Artificial Sequence
  Description of Artificial Sequence: Synthetic Light chain variable region CDR L3 amino acid sequence
ALWYSNLWV

SEQ ID NO: 2304 - DNA, 27 bp, Artificial Sequence
  Description of Artificial Sequence: Synthetic Light chain variable region CDR L3 nucleic acid sequence
gcgctgtggtacagtaacctttgggtg

SEQ ID NO: 2305 - DNA, 375 bp, Artificial Sequence; identical to SEQ ID NO: 17
  Description of Artificial Sequence: Synthetic Heavy chain variable region nucleic acid sequence

SEQ ID NO: 2306 - protein, 125 aa, Artificial Sequence; identical to SEQ ID NO: 18
  Description of Artificial Sequence: Synthetic Heavy chain variable region amino acid sequence

SEQ ID NO: 2307 - protein, 9 aa, Artificial Sequence
  Description of Artificial Sequence: Synthetic Heavy chain variable region CDR H1 amino acid sequence
FTFDTYAMN

SEQ ID NO: 2308 - DNA, 27 bp, Artificial Sequence
  Description of Artificial Sequence: Synthetic Heavy chain variable region CDR H1 nucleic acid sequence
ttcacctttgacacatatgccatgaat

SEQ ID NO: 2309 - protein, 19 aa, Artificial Sequence
  Description of Artificial Sequence: Synthetic Heavy chain variable region CDR H2 amino acid sequence
RIRSKYNNYATYYADSVKD

SEQ ID NO: 2310 - DNA, 57 bp, Artificial Sequence; identical to SEQ ID NO: 6
  Description of Artificial Sequence: Synthetic Heavy chain variable region CDR H2 nucleic acid sequence

SEQ ID NO: 2311 - protein, 16 aa, Artificial Sequence
  Description of Artificial Sequence: Synthetic Heavy chain variable region CDR H3 amino acid sequence
VRHGNFGNGYVSWFAH

SEQ ID NO: 2312 - DNA, 48 bp, Artificial Sequence; identical to SEQ ID NO: 24
  Description of Artificial Sequence: Synthetic Heavy chain variable region CDR H3 nucleic acid sequence

SEQ ID NO: 2313 - DNA, 327 bp, Artificial Sequence
  Description of Artificial Sequence: Synthetic Light chain variable region nucleic acid sequence
cagactgtggtgacccaggagccatcgctctcagtgtcccctggagggacagtcacactcacttgtggatcaagcactggcgcagtcactactagtaactacgccaactgggtccagcagaccccaggccaggctccgcgcggactcatcggcggcacagacaagcgcgctcctggggtccctgatcgcttctctggctccctgcttggggacaaagctgccctcatcatcacgggggcccaggcagatgatgaagctgattattactgtgcgctgtggtacaataacctttgggtgttcggcggagggaccaagctgaccgtccta

SEQ ID NO: 2314 - protein, 109 aa, Artificial Sequence
  Description of Artificial Sequence: Synthetic Light chain variable region amino acid sequence
QTVVTQEPSLSVSPGGTVTLTCGSSTGAVTTSNYANWVQQTPGQAPRGLIGGTDKRAPGVPDRFSGSLLGDKAALIITGAQADDEADYYCALWYNNLWVFGGGTKLTVL

SEQ ID NO: 2315 - protein, 14 aa, Artificial Sequence
  Description of Artificial Sequence: Synthetic Light chain variable region CDR L1 amino acid sequence
GSSTGAVTTSNYAN

SEQ ID NO: 2316 - DNA, 42 bp, Artificial Sequence; identical to SEQ ID NO: 204
  Description of Artificial Sequence: Synthetic Light chain variable region CDR L1 nucleic acid sequence

SEQ ID NO: 2317 - protein, 7 aa, Artificial Sequence
  Description of Artificial Sequence: Synthetic Light chain variable region CDR L2 amino acid sequence
GTDKRAP

SEQ ID NO: 2318 - DNA, 21 bp, Artificial Sequence
  Description of Artificial Sequence: Synthetic Light chain variable region CDR L2 nucleic acid sequence
ggcacagacaagcgcgctcct

SEQ ID NO: 2319 - protein, 9 aa, Artificial Sequence
  Description of Artificial Sequence: Synthetic Light chain variable region CDR L3 amino acid sequence
ALWYNNLWV

SEQ ID NO: 2320 - DNA, 27 bp, Artificial Sequence
  Description of Artificial Sequence: Synthetic Light chain variable region CDR L3 nucleic acid sequence
gcgctgtggtacaataacctttgggtg

SEQ ID NO: 2321 - DNA, 375 bp, Artificial Sequence; identical to SEQ ID NO: 17
  Description of Artificial Sequence: Synthetic Heavy chain variable region nucleic acid sequence

SEQ ID NO: 2322 - protein, 125 aa, Artificial Sequence; identical to SEQ ID NO: 18
  Description of Artificial Sequence: Synthetic Heavy chain variable region amino acid sequence

SEQ ID NO: 2323 - protein, 9 aa, Artificial Sequence
  Description of Artificial Sequence: Synthetic Heavy chain variable region CDR H1 amino acid sequence
FTFDTYAMN

SEQ ID NO: 2324 - DNA, 27 bp, Artificial Sequence
  Description of Artificial Sequence: Synthetic Heavy chain variable region CDR H1 nucleic acid sequence
ttcacctttgacacatatgccatgaat

SEQ ID NO: 2325 - protein, 19 aa, Artificial Sequence
  Description of Artificial Sequence: Synthetic Heavy chain variable region CDR H2 amino acid sequence
RIRSKYNNYATYYADSVKD

SEQ ID NO: 2326 - DNA, 57 bp, Artificial Sequence; identical to SEQ ID NO: 6
  Description of Artificial Sequence: Synthetic Heavy chain variable region CDR H2 nucleic acid sequence

SEQ ID NO: 2327 - protein, 16 aa, Artificial Sequence
  Description of Artificial Sequence: Synthetic Heavy chain variable region CDR H3 amino acid sequence
VRHGNFGNGYVSWFAH

SEQ ID NO: 2328 - DNA, 48 bp, Artificial Sequence; identical to SEQ ID NO: 24
  Description of Artificial Sequence: Synthetic Heavy chain variable region CDR H3 nucleic acid sequence

SEQ ID NO: 2329 - DNA, 327 bp, Artificial Sequence
  Description of Artificial Sequence: Synthetic Light chain variable region nucleic acid sequence
cagactgtggtgacccaggagccatcgctctcagtgtcccctggagggacagtcacactcacttgtggatcaagcactggcgcagtcactactagtaactacgccaactgggtccagcagaccccaggccaggctccgcgcggactcatcggcggcacagacaagcgcgctcctggggtccctgatcgcttctctggctccctgcttggggacaaagctgccctcaccatcacgggggcccaggcagatgatgaagctgattattactgtgtgctgtggtacaataacctttgggtgttcggcggagggaccaagctgaccgtccta

SEQ ID NO: 2330 - protein, 109 aa, Artificial Sequence
  Description of Artificial Sequence: Synthetic Light chain variable region amino acid sequence
QTVVTQEPSLSVSPGGTVTLTCGSSTGAVTTSNYANWVQQTPGQAPRGLIGGTDKRAPGVPDRFSGSLLGDKAALTITGAQADDEADYYCVLWYNNLWVFGGGTKLTVL

SEQ ID NO: 2331 - protein, 14 aa, Artificial Sequence
  Description of Artificial Sequence: Synthetic Light chain variable region CDR L1 amino acid sequence
GSSTGAVTTSNYAN

SEQ ID NO: 2332 - DNA, 42 bp, Artificial Sequence; identical to SEQ ID NO: 204
  Description of Artificial Sequence: Synthetic Light chain variable region CDR L1 nucleic acid sequence

SEQ ID NO: 2333 - protein, 7 aa, Artificial Sequence
  Description of Artificial Sequence: Synthetic Light chain variable region CDR L2 amino acid sequence
GTDKRAP

SEQ ID NO: 2334 - DNA, 21 bp, Artificial Sequence
  Description of Artificial Sequence: Synthetic Light chain variable region CDR L2 nucleic acid sequence
ggcacagacaagcgcgctcct

SEQ ID NO: 2335 - protein, 9 aa, Artificial Sequence
  Description of Artificial Sequence: Synthetic Light chain variable region CDR L3 amino acid sequence
VLWYNNLWV

SEQ ID NO: 2336 - DNA, 27 bp, Artificial Sequence
  Description of Artificial Sequence: Synthetic Light chain variable region CDR L3 nucleic acid sequence
gtgctgtggtacaataacctttgggtg

SEQ ID NO: 2337 - DNA, 375 bp, Artificial Sequence; identical to SEQ ID NO: 65
  Description of Artificial Sequence: Synthetic Heavy chain variable region nucleic acid sequence

SEQ ID NO: 2338 - protein, 125 aa, Artificial Sequence; identical to SEQ ID NO: 66
  Description of Artificial Sequence: Synthetic Heavy chain variable region amino acid sequence

SEQ ID NO: 2339 - protein, 9 aa, Artificial Sequence
  Description of Artificial Sequence: Synthetic Heavy chain variable region CDR H1 amino acid sequence
FTFDTYAMN

SEQ ID NO: 2340 - DNA, 27 bp, Artificial Sequence
  Description of Artificial Sequence: Synthetic Heavy chain variable region CDR H1 nucleic acid sequence
ttcacctttgacacatatgccatgaat

SEQ ID NO: 2341 - protein, 19 aa, Artificial Sequence
  Description of Artificial Sequence: Synthetic Heavy chain variable region CDR H2 amino acid sequence
RIRSKYNNYATYYADSVKG

SEQ ID NO: 2342 - DNA, 57 bp, Artificial Sequence; identical to SEQ ID NO: 70
  Description of Artificial Sequence: Synthetic Heavy chain variable region CDR H2 nucleic acid sequence

SEQ ID NO: 2343 - protein, 16 aa, Artificial Sequence
  Description of Artificial Sequence: Synthetic Heavy chain variable region CDR H3 amino acid sequence
VRHGNFGNSYVSWFAH

SEQ ID NO: 2344 - DNA, 48 bp, Artificial Sequence; identical to SEQ ID NO: 72
  Description of Artificial Sequence: Synthetic Heavy chain variable region CDR H3 nucleic acid sequence

SEQ ID NO: 2345 - DNA, 327 bp, Artificial Sequence
  Description of Artificial Sequence: Synthetic Light chain variable region nucleic acid sequence
agacatgtggtgacccaggagccatcgctctcagtgtcccctggagggacagtcacactcacttgtggatcaagcactggcgcagtcactactagtaactacgccaactgggtccagcagaccccaggccaggctccgcgcggactcatcggcggcccagacaagcgcgctcctggggtccctgatcgcttctctggctccctgcttggggacaaagctgccctcatcatcacgggggtccaggcagatgatgaagctgattattactgtgcgctgtggtacagtaacctttgggtgttcggcggagggaccaagctgaccgtccta

SEQ ID NO: 2346 - protein, 109 aa, Artificial Sequence
  Description of Artificial Sequence: Synthetic Light chain variable region amino acid sequence
RHVVTQEPSLSVSPGGTVTLTCGSSTGAVTTSNYANWVQQTPGQAPRGLIGGPDKRAPGVPDRFSGSLLGDKAALIITGVQADDEADYYCALWYSNLWVFGGGTKLTVL

SEQ ID NO: 2347 - protein, 14 aa, Artificial Sequence
  Description of Artificial Sequence: Synthetic Light chain variable region CDR L1 amino acid sequence
GSSTGAVTTSNYAN

SEQ ID NO: 2348 - DNA, 42 bp, Artificial Sequence; identical to SEQ ID NO: 204
  Description of Artificial Sequence: Synthetic Light chain variable region CDR L1 nucleic acid sequence

SEQ ID NO: 2349 - protein, 7 aa, Artificial Sequence
  Description of Artificial Sequence: Synthetic Light chain variable region CDR L2 amino acid sequence
GPDKRAP

SEQ ID NO: 2350 - DNA, 21 bp, Artificial Sequence
  Description of Artificial Sequence: Synthetic Light chain variable region CDR L2 nucleic acid sequence
ggcccagacaagcgcgctcct

SEQ ID NO: 2351 - protein, 9 aa, Artificial Sequence
  Description of Artificial Sequence: Synthetic Light chain variable region CDR L3 amino acid sequence
ALWYSNLWV

SEQ ID NO: 2352 - DNA, 27 bp, Artificial Sequence
  Description of Artificial Sequence: Synthetic Light chain variable region CDR L3 nucleic acid sequence
gcgctgtggtacagtaacctttgggtg

SEQ ID NO: 2353 - DNA, 375 bp, Artificial Sequence; identical to SEQ ID NO: 145
  Description of Artificial Sequence: Synthetic Heavy chain variable region nucleic acid sequence

SEQ ID NO: 2354 - protein, 125 aa, Artificial Sequence; identical to SEQ ID NO: 146
  Description of Artificial Sequence: Synthetic Heavy chain variable region amino acid sequence

SEQ ID NO: 2355 - protein, 9 aa, Artificial Sequence
  Description of Artificial Sequence: Synthetic Heavy chain variable region CDR H1 amino acid sequence
FTFDTYAMN

SEQ ID NO: 2356 - DNA, 27 bp, Artificial Sequence
  Description of Artificial Sequence: Synthetic Heavy chain variable region CDR H1 nucleic acid sequence
ttcacctttgacacatatgccatgaat

SEQ ID NO: 2357 - protein, 19 aa, Artificial Sequence
  Description of Artificial Sequence: Synthetic Heavy chain variable region CDR H2 amino acid sequence
RIRSKYNNYATYYADSVKD

SEQ ID NO: 2358 - DNA, 57 bp, Artificial Sequence; identical to SEQ ID NO: 6
  Description of Artificial Sequence: Synthetic Heavy chain variable region CDR H2 nucleic acid sequence

SEQ ID NO: 2359 - protein, 16 aa, Artificial Sequence
  Description of Artificial Sequence: Synthetic Heavy chain variable region CDR H3 amino acid sequence
VRHSNFGNSYVSWFAH

SEQ ID NO: 2360 - DNA, 48 bp, Artificial Sequence; identical to SEQ ID NO: 152
  Description of Artificial Sequence: Synthetic Heavy chain variable region CDR H3 nucleic acid sequence

SEQ ID NO: 2361 - DNA, 327 bp, Artificial Sequence
  Description of Artificial Sequence: Synthetic Light chain variable region nucleic acid sequence
agaactgtggtgacccaggagccatcgctctcagtgtcccctggagggacagtcacactcacttgtggatcaagcactggcgcagtcactactagtaactacgccaactgggtccagcagaccccaggccaggctccgcgcggactcatcggcggcacagacaagcgcgctcctggggtccctgatcgcttctctggctccctgcttggggacaaagctgccctcaccatcacgggggcccaggcagatgatgaagctgattattactgtgtgctgtggtacaataacctttgggtgttcggcggagggaccaagctgaccgtccta

SEQ ID NO: 2362 - protein, 109 aa, Artificial Sequence
  Description of Artificial Sequence: Synthetic Light chain variable region amino acid sequence
RTVVTQEPSLSVSPGGTVTLTCGSSTGAVTTSNYANWVQQTPGQAPRGLIGGTDKRAPGVPDRFSGSLLGDKAALTITGAQADDEADYYCVLWYNNLWVFGGGTKLTVL

SEQ ID NO: 2363 - protein, 14 aa, Artificial Sequence
  Description of Artificial Sequence: Synthetic Light chain variable region CDR L1 amino acid sequence
GSSTGAVTTSNYAN

SEQ ID NO: 2364 - DNA, 42 bp, Artificial Sequence; identical to SEQ ID NO: 204
  Description of Artificial Sequence: Synthetic Light chain variable region CDR L1 nucleic acid sequence

SEQ ID NO: 2365 - protein, 7 aa, Artificial Sequence
  Description of Artificial Sequence: Synthetic Light chain variable region CDR L2 amino acid sequence
GTDKRAP

SEQ ID NO: 2366 - DNA, 21 bp, Artificial Sequence
  Description of Artificial Sequence: Synthetic Light chain variable region CDR L2 nucleic acid sequence
ggcacagacaagcgcgctcct

SEQ ID NO: 2367 - protein, 9 aa, Artificial Sequence
  Description of Artificial Sequence: Synthetic Light chain variable region CDR L3 amino acid sequence
VLWYNNLWV

SEQ ID NO: 2368 - DNA, 27 bp, Artificial Sequence
  Description of Artificial Sequence: Synthetic Light chain variable region CDR L3 nucleic acid sequence
gtgctgtggtacaataacctttgggtg

SEQ ID NO: 2369 - DNA, 375 bp, Artificial Sequence; identical to SEQ ID NO: 65
  Description of Artificial Sequence: Synthetic Heavy chain variable region nucleic acid sequence

SEQ ID NO: 2370 - protein, 125 aa, Artificial Sequence; identical to SEQ ID NO: 66
  Description of Artificial Sequence: Synthetic Heavy chain variable region amino acid sequence

SEQ ID NO: 2371 - protein, 9 aa, Artificial Sequence
  Description of Artificial Sequence: Synthetic Heavy chain variable region CDR H1 amino acid sequence
FTFDTYAMN

SEQ ID NO: 2372 - DNA, 27 bp, Artificial Sequence
  Description of Artificial Sequence: Synthetic Heavy chain variable region CDR H1 nucleic acid sequence
ttcacctttgacacatatgccatgaat

SEQ ID NO: 2373 - protein, 19 aa, Artificial Sequence
  Description of Artificial Sequence: Synthetic Heavy chain variable region CDR H2 amino acid sequence
RIRSKYNNYATYYADSVKG

SEQ ID NO: 2374 - DNA, 57 bp, Artificial Sequence; identical to SEQ ID NO: 70
  Description of Artificial Sequence: Synthetic Heavy chain variable region CDR H2 nucleic acid sequence

SEQ ID NO: 2375 - protein, 16 aa, Artificial Sequence
  Description of Artificial Sequence: Synthetic Heavy chain variable region CDR H3 amino acid sequence
VRHGNFGNSYVSWFAH

SEQ ID NO: 2376 - DNA, 48 bp, Artificial Sequence; identical to SEQ ID NO: 72
  Description of Artificial Sequence: Synthetic Heavy chain variable region CDR H3 nucleic acid sequence

SEQ ID NO: 2377 - DNA, 327 bp, Artificial Sequence; identical to SEQ ID NO: 1737
  Description of Artificial Sequence: Synthetic Light chain variable region nucleic acid sequence

SEQ ID NO: 2378 - protein, 109 aa, Artificial Sequence; identical to SEQ ID NO: 1738
  Description of Artificial Sequence: Synthetic Light chain variable region amino acid sequence

SEQ ID NO: 2379 - protein, 14 aa, Artificial Sequence
  Description of Artificial Sequence: Synthetic Light chain variable region CDR L1 amino acid sequence
GSSAGAVTTSNYAN

SEQ ID NO: 2380 - DNA, 42 bp, Artificial Sequence; identical to SEQ ID NO: 236
  Description of Artificial Sequence: Synthetic Light chain variable region CDR L1 nucleic acid sequence

SEQ ID NO: 2381 - protein, 7 aa, Artificial Sequence
  Description of Artificial Sequence: Synthetic Light chain variable region CDR L2 amino acid sequence
GTDKRAP

SEQ ID NO: 2382 - DNA, 21 bp, Artificial Sequence
  Description of Artificial Sequence: Synthetic Light chain variable region CDR L2 nucleic acid sequence
ggcacagacaagcgcgctcct

SEQ ID NO: 2383 - protein, 9 aa, Artificial Sequence
  Description of Artificial Sequence: Synthetic Light chain variable region CDR L3 amino acid sequence
ALWYSNLWV

SEQ ID NO: 2384 - DNA, 27 bp, Artificial Sequence
  Description of Artificial Sequence: Synthetic Light chain variable region CDR L3 nucleic acid sequence
gcgctgtggtacagtaacctttgggtg

SEQ ID NO: 2385 - DNA, 375 bp, Artificial Sequence; identical to SEQ ID NO: 17
  Description of Artificial Sequence: Synthetic Heavy chain variable region nucleic acid sequence

SEQ ID NO: 2386 - protein, 125 aa, Artificial Sequence; identical to SEQ ID NO: 18
  Description of Artificial Sequence: Synthetic Heavy chain variable region amino acid sequence

SEQ ID NO: 2387 - protein, 9 aa, Artificial Sequence
  Description of Artificial Sequence: Synthetic Heavy chain variable region CDR H1 amino acid sequence
FTFDTYAMN

SEQ ID NO: 2388 - DNA, 27 bp, Artificial Sequence
  Description of Artificial Sequence: Synthetic Heavy chain variable region CDR H1 nucleic acid sequence
ttcacctttgacacatatgccatgaat

SEQ ID NO: 2389 - protein, 19 aa, Artificial Sequence
  Description of Artificial Sequence: Synthetic Heavy chain variable region CDR H2 amino acid sequence
RIRSKYNNYATYYADSVKD

SEQ ID NO: 2390 - DNA, 57 bp, Artificial Sequence; identical to SEQ ID NO: 6
  Description of Artificial Sequence: Synthetic Heavy chain variable region CDR H2 nucleic acid sequence

SEQ ID NO: 2391 - protein, 16 aa, Artificial Sequence
  Description of Artificial Sequence: Synthetic Heavy chain variable region CDR H3 amino acid sequence
VRHGNFGNGYVSWFAH

SEQ ID NO: 2392 - DNA, 48 bp, Artificial Sequence; identical to SEQ ID NO: 24
  Description of Artificial Sequence: Synthetic Heavy chain variable region CDR H3 nucleic acid sequence

SEQ ID NO: 2393 - DNA, 327 bp, Artificial Sequence; identical to SEQ ID NO: 1257
  Description of Artificial Sequence: Synthetic Light chain variable region nucleic acid sequence

SEQ ID NO: 2394 - protein, 109 aa, Artificial Sequence; identical to SEQ ID NO: 1258
  Description of Artificial Sequence: Synthetic Light chain variable region amino acid sequence

SEQ ID NO: 2395 - protein, 14 aa, Artificial Sequence
  Description of Artificial Sequence: Synthetic Light chain variable region CDR L1 amino acid sequence
GSSTGAVTTSNYAN

SEQ ID NO: 2396 - DNA, 42 bp, Artificial Sequence; identical to SEQ ID NO: 204
  Description of Artificial Sequence: Synthetic Light chain variable region CDR L1 nucleic acid sequence

SEQ ID NO: 2397 - protein, 7 aa, Artificial Sequence
  Description of Artificial Sequence: Synthetic Light chain variable region CDR L2 amino acid sequence
GTDKRAP

SEQ ID NO: 2398 - DNA, 21 bp, Artificial Sequence
  Description of Artificial Sequence: Synthetic Light chain variable region CDR L2 nucleic acid sequence
ggcacagacaagcgcgctcct

SEQ ID NO: 2399 - protein, 9 aa, Artificial Sequence
  Description of Artificial Sequence: Synthetic Light chain variable region CDR L3 amino acid sequence
ALWYSNLWV

SEQ ID NO: 2400 - DNA, 27 bp, Artificial Sequence
  Description of Artificial Sequence: Synthetic Light chain variable region CDR L3 nucleic acid sequence
gcgctgtggtacagtaacctttgggtg

SEQ ID NO: 2401 - DNA, 375 bp, Artificial Sequence; identical to SEQ ID NO: 17
  Description of Artificial Sequence: Synthetic Heavy chain variable region nucleic acid sequence

SEQ ID NO: 2402 - protein, 125 aa, Artificial Sequence; identical to SEQ ID NO: 18
  Description of Artificial Sequence: Synthetic Heavy chain variable region amino acid sequence

SEQ ID NO: 2403 - protein, 9 aa, Artificial Sequence
  Description of Artificial Sequence: Synthetic Heavy chain variable region CDR H1 amino acid sequence
FTFDTYAMN

SEQ ID NO: 2404 - DNA, 27 bp, Artificial Sequence
  Description of Artificial Sequence: Synthetic Heavy chain variable region CDR H1 nucleic acid sequence
ttcacctttgacacatatgccatgaat

SEQ ID NO: 2405 - protein, 19 aa, Artificial Sequence
  Description of Artificial Sequence: Synthetic Heavy chain variable region CDR H2 amino acid sequence
RIRSKYNNYATYYADSVKD

SEQ ID NO: 2406 - DNA, 57 bp, Artificial Sequence; identical to SEQ ID NO: 6
  Description of Artificial Sequence: Synthetic Heavy chain variable region CDR H2 nucleic acid sequence

SEQ ID NO: 2407 - protein, 16 aa, Artificial Sequence
  Description of Artificial Sequence: Synthetic Heavy chain variable region CDR H3 amino acid sequence
VRHGNFGNGYVSWFAH

SEQ ID NO: 2408 - DNA, 48 bp, Artificial Sequence; identical to SEQ ID NO: 24
  Description of Artificial Sequence: Synthetic Heavy chain variable region CDR H3 nucleic acid sequence

SEQ ID NO: 2409 - DNA, 327 bp, Artificial Sequence
  Description of Artificial Sequence: Synthetic Light chain variable region nucleic acid sequence
cagactgtggtgacccaggagccatcgctctcagtgtcccctggagggacagtcacactcacttgtggatcaagcactggcgcagtcactactagtaactacgccaactgggtccagcagaccccaggccaggctccgcgcggactcatcggcggcacagacaagcgcgctcctggggtccctgatcgcttctctggctccctgcttggggacaaagctgccctcaccatcacgggggcccaggcagaggatgaagctgattattactgtgcgctgtggtacaataacctttgggtgttcggcggagggaccaagctgaccgtccta

SEQ ID NO: 2410 - protein, 109 aa, Artificial Sequence
  Description of Artificial Sequence: Synthetic Light chain variable region amino acid sequence
QTVVTQEPSLSVSPGGTVTLTCGSSTGAVTTSNYANWVQQTPGQAPRGLIGGTDKRAPGVPDRFSGSLLGDKAALTITGAQAEDEADYYCALWYNNLWVFGGGTKLTVL

SEQ ID NO: 2411 - protein, 14 aa, Artificial Sequence
  Description of Artificial Sequence: Synthetic Light chain variable region CDR L1 amino acid sequence
GSSTGAVTTSNYAN

SEQ ID NO: 2412 - DNA, 42 bp, Artificial Sequence; identical to SEQ ID NO: 204
  Description of Artificial Sequence: Synthetic Light chain variable region CDR L1 nucleic acid sequence

SEQ ID NO: 2413 - protein, 7 aa, Artificial Sequence
  Description of Artificial Sequence: Synthetic Light chain variable region CDR L2 amino acid sequence
GTDKRAP

SEQ ID NO: 2414 - DNA, 21 bp, Artificial Sequence
  Description of Artificial Sequence: Synthetic Light chain variable region CDR L2 nucleic acid sequence
ggcacagacaagcgcgctcct

SEQ ID NO: 2415 - protein, 9 aa, Artificial Sequence
  Description of Artificial Sequence: Synthetic Light chain variable region CDR L3 amino acid sequence
ALWYNNLWV

SEQ ID NO: 2416 - DNA, 27 bp, Artificial Sequence
  Description of Artificial Sequence: Synthetic Light chain variable region CDR L3 nucleic acid sequence
gcgctgtggtacaataacctttgggtg

SEQ ID NO: 2417 - DNA, 375 bp, Artificial Sequence; identical to SEQ ID NO: 17
  Description of Artificial Sequence: Synthetic Heavy chain variable region nucleic acid sequence

SEQ ID NO: 2418 - protein, 125 aa, Artificial Sequence; identical to SEQ ID NO: 18
  Description of Artificial Sequence: Synthetic Heavy chain variable region amino acid sequence

SEQ ID NO: 2419 - protein, 9 aa, Artificial Sequence
  Description of Artificial Sequence: Synthetic Heavy chain variable region CDR H1 amino acid sequence
FTFDTYAMN

SEQ ID NO: 2420 - DNA, 27 bp, Artificial Sequence
  Description of Artificial Sequence: Synthetic Heavy chain variable region CDR H1 nucleic acid sequence
ttcacctttgacacatatgccatgaat

SEQ ID NO: 2421 - protein, 19 aa, Artificial Sequence
  Description of Artificial Sequence: Synthetic Heavy chain variable region CDR H2 amino acid sequence
RIRSKYNNYATYYADSVKD

SEQ ID NO: 2422 - DNA, 57 bp, Artificial Sequence; identical to SEQ ID NO: 6
  Description of Artificial Sequence: Synthetic Heavy chain variable region CDR H2 nucleic acid sequence

SEQ ID NO: 2423 - protein, 16 aa, Artificial Sequence
  Description of Artificial Sequence: Synthetic Heavy chain variable region CDR H3 amino acid sequence
VRHGNFGNGYVSWFAH

SEQ ID NO: 2424 - DNA, 48 bp, Artificial Sequence; identical to SEQ ID NO: 24
  Description of Artificial Sequence: Synthetic Heavy chain variable region CDR H3 nucleic acid sequence

SEQ ID NO: 2425 - DNA, 327 bp, Artificial Sequence
  Description of Artificial Sequence: Synthetic Light chain variable region nucleic acid sequence
cagactgtggtgacccaggagccatcgctctcagtgtcccctggagggacagtcacactcacttgtggatcaagcactggcgcagtcactactagtaactacgccaactgggtccagcagaccccaggccaggctccgcgcggactcatcggcggcacagacaagcgcgctcctggggtccctgatcgcttctctggctccctgcttggggacaaagctgccctcaccatcacgggggcccaggcagatgatgaagctgattattactgtgtgctgtggtacagtaaccattgggtgttcggcggagggaccaagctgaccgtccta

SEQ ID NO: 2426 - protein, 109 aa, Artificial Sequence
  Description of Artificial Sequence: Synthetic Light chain variable region amino acid sequence
QTVVTQEPSLSVSPGGTVTLTCGSSTGAVTTSNYANWVQQTPGQAPRGLIGGTDKRAPGVPDRFSGSLLGDKAALTITGAQADDEADYYCVLWYSNHWVFGGGTKLTVL

SEQ ID NO: 2427 - protein, 14 aa, Artificial Sequence
  Description of Artificial Sequence: Synthetic Light chain variable region CDR L1 amino acid sequence
GSSTGAVTTSNYAN

SEQ ID NO: 2428 - DNA, 42 bp, Artificial Sequence; identical to SEQ ID NO: 204
  Description of Artificial Sequence: Synthetic Light chain variable region CDR L1 nucleic acid sequence

SEQ ID NO: 2429 - protein, 7 aa, Artificial Sequence
  Description of Artificial Sequence: Synthetic Light chain variable region CDR L2 amino acid sequence
GTDKRAP

SEQ ID NO: 2430 - DNA, 21 bp, Artificial Sequence
  Description of Artificial Sequence: Synthetic Light chain variable region CDR L2 nucleic acid sequence
ggcacagacaagcgcgctcct

SEQ ID NO: 2431 - protein, 9 aa, Artificial Sequence
  Description of Artificial Sequence: Synthetic Light chain variable region CDR L3 amino acid sequence
VLWYSNHWV

SEQ ID NO: 2432 - DNA, 27 bp, Artificial Sequence
  Description of Artificial Sequence: Synthetic Light chain variable region CDR L3 nucleic acid sequence
gtgctgtggtacagtaaccattgggtg

SEQ ID NO: 2433 - DNA, 375 bp, Artificial Sequence; identical to SEQ ID NO: 17
  Description of Artificial Sequence: Synthetic Heavy chain variable region nucleic acid sequence

SEQ ID NO: 2434 - protein, 125 aa, Artificial Sequence; identical to SEQ ID NO: 18
  Description of Artificial Sequence: Synthetic Heavy chain variable region amino acid sequence

SEQ ID NO: 2435 - protein, 9 aa, Artificial Sequence
  Description of Artificial Sequence: Synthetic Heavy chain variable region CDR H1 amino acid sequence
FTFDTYAMN

SEQ ID NO: 2436 - DNA, 27 bp, Artificial Sequence
  Description of Artificial Sequence: Synthetic Heavy chain variable region CDR H1 nucleic acid sequence
ttcacctttgacacatatgccatgaat

SEQ ID NO: 2437 - protein, 19 aa, Artificial Sequence
  Description of Artificial Sequence: Synthetic Heavy chain variable region CDR H2 amino acid sequence
RIRSKYNNYATYYADSVKD

SEQ ID NO: 2438 - DNA, 57 bp, Artificial Sequence; identical to SEQ ID NO: 6
  Description of Artificial Sequence: Synthetic Heavy chain variable region CDR H2 nucleic acid sequence

SEQ ID NO: 2439 - protein, 16 aa, Artificial Sequence
  Description of Artificial Sequence: Synthetic Heavy chain variable region CDR H3 amino acid sequence
VRHGNFGNGYVSWFAH

SEQ ID NO: 2440 - DNA, 48 bp, Artificial Sequence; identical to SEQ ID NO: 24
  Description of Artificial Sequence: Synthetic Heavy chain variable region CDR H3 nucleic acid sequence

SEQ ID NO: 2441 - DNA, 327 bp, Artificial Sequence; identical to SEQ ID NO: 2281
  Description of Artificial Sequence: Synthetic Light chain variable region nucleic acid sequence

SEQ ID NO: 2442 - protein, 109 aa, Artificial Sequence; identical to SEQ ID NO: 2282
  Description of Artificial Sequence: Synthetic Light chain variable region amino acid sequence

SEQ ID NO: 2443 - protein, 14 aa, Artificial Sequence
  Description of Artificial Sequence: Synthetic Light chain variable region CDR L1 amino acid sequence
GSSTGAVTTSNYAN

SEQ ID NO: 2444 - DNA, 42 bp, Artificial Sequence; identical to SEQ ID NO: 204
  Description of Artificial Sequence: Synthetic Light chain variable region CDR L1 nucleic acid sequence

SEQ ID NO: 2445 - protein, 7 aa, Artificial Sequence
  Description of Artificial Sequence: Synthetic Light chain variable region CDR L2 amino acid sequence
GTDKRAP

SEQ ID NO: 2446 - DNA, 21 bp, Artificial Sequence
  Description of Artificial Sequence: Synthetic Light chain variable region CDR L2 nucleic acid sequence
ggcacagacaagcgcgctcct

SEQ ID NO: 2447 - protein, 9 aa, Artificial Sequence
  Description of Artificial Sequence: Synthetic Light chain variable region CDR L3 amino acid sequence
ALWYSNHWV

SEQ ID NO: 2448 - DNA, 27 bp, Artificial Sequence
  Description of Artificial Sequence: Synthetic Light chain variable region CDR L3 nucleic acid sequence
gcgctgtggtacagtaaccattgggtg

SEQ ID NO: 2449 - DNA, 375 bp, Artificial Sequence; identical to SEQ ID NO: 65
  Description of Artificial Sequence: Synthetic Heavy chain variable region nucleic acid sequence

SEQ ID NO: 2450 - protein, 125 aa, Artificial Sequence; identical to SEQ ID NO: 66
  Description of Artificial Sequence: Synthetic Heavy chain variable region amino acid sequence

SEQ ID NO: 2451 - protein, 9 aa, Artificial Sequence
  Description of Artificial Sequence: Synthetic Heavy chain variable region CDR H1 amino acid sequence
FTFDTYAMN

SEQ ID NO: 2452 - DNA, 27 bp, Artificial Sequence
  Description of Artificial Sequence: Synthetic Heavy chain variable region CDR H1 nucleic acid sequence
ttcacctttgacacatatgccatgaat

SEQ ID NO: 2453 - protein, 19 aa, Artificial Sequence
  Description of Artificial Sequence: Synthetic Heavy chain variable region CDR H2 amino acid sequence
RIRSKYNNYATYYADSVKG

SEQ ID NO: 2454 - DNA, 57 bp, Artificial Sequence; identical to SEQ ID NO: 70
  Description of Artificial Sequence: Synthetic Heavy chain variable region CDR H2 nucleic acid sequence

SEQ ID NO: 2455 - protein, 16 aa, Artificial Sequence
  Description of Artificial Sequence: Synthetic Heavy chain variable region CDR H3 amino acid sequence
VRHGNFGNSYVSWFAH

SEQ ID NO: 2456 - DNA, 48 bp, Artificial Sequence; identical to SEQ ID NO: 72
  Description of Artificial Sequence: Synthetic Heavy chain variable region CDR H3 nucleic acid sequence

SEQ ID NO: 2457 - DNA, 327 bp, Artificial Sequence; identical to SEQ ID NO: 265
  Description of Artificial Sequence: Synthetic Light chain variable region nucleic acid sequence

SEQ ID NO: 2458 - protein, 109 aa, Artificial Sequence; identical to SEQ ID NO: 266
  Description of Artificial Sequence: Synthetic Light chain variable region amino acid sequence

SEQ ID NO: 2459 - protein, 14 aa, Artificial Sequence
  Description of Artificial Sequence: Synthetic Light chain variable region CDR L1 amino acid sequence
GSSTGAVTTSNYAN

SEQ ID NO: 2460 - DNA, 42 bp, Artificial Sequence; identical to SEQ ID NO: 204
  Description of Artificial Sequence: Synthetic Light chain variable region CDR L1 nucleic acid sequence

SEQ ID NO: 2461 - protein, 7 aa, Artificial Sequence
  Description of Artificial Sequence: Synthetic Light chain variable region CDR L2 amino acid sequence
GTDKRAP

SEQ ID NO: 2462 - DNA, 21 bp, Artificial Sequence
  Description of Artificial Sequence: Synthetic Light chain variable region CDR L2 nucleic acid sequence
ggcacagacaagcgcgctcct

SEQ ID NO: 2463 - protein, 9 aa, Artificial Sequence
  Description of Artificial Sequence: Synthetic Light chain variable region CDR L3 amino acid sequence
ALWYNNHWV

SEQ ID NO: 2464 - DNA, 27 bp, Artificial Sequence
  Description of Artificial Sequence: Synthetic Light chain variable region CDR L3 nucleic acid sequence
gcgctgtggtacaataaccattgggtg

SEQ ID NO: 2465 - DNA, 375 bp, Artificial Sequence; identical to SEQ ID NO: 65
  Description of Artificial Sequence: Synthetic Heavy chain variable region nucleic acid sequence

SEQ ID NO: 2466 - protein, 125 aa, Artificial Sequence; identical to SEQ ID NO: 66
  Description of Artificial Sequence: Synthetic Heavy chain variable region amino acid sequence

SEQ ID NO: 2467 - protein, 9 aa, Artificial Sequence
  Description of Artificial Sequence: Synthetic Heavy chain variable region CDR H1 amino acid sequence
FTFDTYAMN

SEQ ID NO: 2468 - DNA, 27 bp, Artificial Sequence
  Description of Artificial Sequence: Synthetic Heavy chain variable region CDR H1 nucleic acid sequence
ttcacctttgacacatatgccatgaat

SEQ ID NO: 2469 - protein, 19 aa, Artificial Sequence
  Description of Artificial Sequence: Synthetic Heavy chain variable region CDR H2 amino acid sequence
RIRSKYNNYATYYADSVKG

SEQ ID NO: 2470 - DNA, 57 bp, Artificial Sequence; identical to SEQ ID NO: 70
  Description of Artificial Sequence: Synthetic Heavy chain variable region CDR H2 nucleic acid sequence

SEQ ID NO: 2471 - protein, 16 aa, Artificial Sequence
  Description of Artificial Sequence: Synthetic Heavy chain variable region CDR H3 amino acid sequence
VRHGNFGNSYVSWFAH

SEQ ID NO: 2472 - DNA, 48 bp, Artificial Sequence; identical to SEQ ID NO: 72
  Description of Artificial Sequence: Synthetic Heavy chain variable region CDR H3 nucleic acid sequence

SEQ ID NO: 2473 - DNA, 327 bp, Artificial Sequence; identical to SEQ ID NO: 361
  Description of Artificial Sequence: Synthetic Light chain variable region nucleic acid sequence

SEQ ID NO: 2474 - protein, 109 aa, Artificial Sequence; identical to SEQ ID NO: 362
  Description of Artificial Sequence: Synthetic Light chain variable region amino acid sequence

SEQ ID NO: 2475 - protein, 14 aa, Artificial Sequence
  Description of Artificial Sequence: Synthetic Light chain variable region CDR L1 amino acid sequence
GSSAGAVTTSNYAN

SEQ ID NO: 2476 - DNA, 42 bp, Artificial Sequence; identical to SEQ ID NO: 236
  Description of Artificial Sequence: Synthetic Light chain variable region CDR L1 nucleic acid sequence

SEQ ID NO: 2477 - protein, 7 aa, Artificial Sequence
  Description of Artificial Sequence: Synthetic Light chain variable region CDR L2 amino acid sequence
GTDKRAP

SEQ ID NO: 2478 - DNA, 21 bp, Artificial Sequence
  Description of Artificial Sequence: Synthetic Light chain variable region CDR L2 nucleic acid sequence
ggcacagacaagcgcgctcct

SEQ ID NO: 2479 - protein, 9 aa, Artificial Sequence
  Description of Artificial Sequence: Synthetic Light chain variable region CDR L3 amino acid sequence
ALWYSNLWV

SEQ ID NO: 2480 - DNA, 27 bp, Artificial Sequence
  Description of Artificial Sequence: Synthetic Light chain variable region CDR L3 nucleic acid sequence
gcgctgtggtacagtaacctttgggtg

SEQ ID NO: 2481 - DNA, 375 bp, Artificial Sequence; identical to SEQ ID NO: 65
  Description of Artificial Sequence: Synthetic Heavy chain variable region nucleic acid sequence

SEQ ID NO: 2482 - protein, 125 aa, Artificial Sequence; identical to SEQ ID NO: 66
  Description of Artificial Sequence: Synthetic Heavy chain variable region amino acid sequence

SEQ ID NO: 2483 - protein, 9 aa, Artificial Sequence
  Description of Artificial Sequence: Synthetic Heavy chain variable region CDR H1 amino acid sequence
FTFDTYAMN

SEQ ID NO: 2484 - DNA, 27 bp, Artificial Sequence
  Description of Artificial Sequence: Synthetic Heavy chain variable region CDR H1 nucleic acid sequence
ttcacctttgacacatatgccatgaat

SEQ ID NO: 2485 - protein, 19 aa, Artificial Sequence
  Description of Artificial Sequence: Synthetic Heavy chain variable region CDR H2 amino acid sequence
RIRSKYNNYATYYADSVKG

SEQ ID NO: 2486 - DNA, 57 bp, Artificial Sequence; identical to SEQ ID NO: 70
  Description of Artificial Sequence: Synthetic Heavy chain variable region CDR H2 nucleic acid sequence

SEQ ID NO: 2487 - protein, 16 aa, Artificial Sequence
  Description of Artificial Sequence: Synthetic Heavy chain variable region CDR H3 amino acid sequence
VRHGNFGNSYVSWFAH

SEQ ID NO: 2488 - DNA, 48 bp, Artificial Sequence; identical to SEQ ID NO: 72
  Description of Artificial Sequence: Synthetic Heavy chain variable region CDR H3 nucleic acid sequence

SEQ ID NO: 2489 - DNA, 327 bp, Artificial Sequence; identical to SEQ ID NO: 2313
  Description of Artificial Sequence: Synthetic Light chain variable region nucleic acid sequence

SEQ ID NO: 2490 - protein, 109 aa, Artificial Sequence; identical to SEQ ID NO: 2314
  Description of Artificial Sequence: Synthetic Light chain variable region amino acid sequence

SEQ ID NO: 2491 - protein, 14 aa, Artificial Sequence
  Description of Artificial Sequence: Synthetic Light chain variable region CDR L1 amino acid sequence
GSSTGAVTTSNYAN

SEQ ID NO: 2492 - DNA, 42 bp, Artificial Sequence; identical to SEQ ID NO: 204
  Description of Artificial Sequence: Synthetic Light chain variable region CDR L1 nucleic acid sequence

SEQ ID NO: 2493 - protein, 7 aa, Artificial Sequence
  Description of Artificial Sequence: Synthetic Light chain variable region CDR L2 amino acid sequence
GTDKRAP

SEQ ID NO: 2494 - DNA, 21 bp, Artificial Sequence
  Description of Artificial Sequence: Synthetic Light chain variable region CDR L2 nucleic acid sequence
ggcacagacaagcgcgctcct

SEQ ID NO: 2495 - protein, 9 aa, Artificial Sequence
  Description of Artificial Sequence: Synthetic Light chain variable region CDR L3 amino acid sequence
ALWYNNLWV

SEQ ID NO: 2496 - DNA, 27 bp, Artificial Sequence
  Description of Artificial Sequence: Synthetic Light chain variable region CDR L3 nucleic acid sequence
gcgctgtggtacaataacctttgggtg

SEQ ID NO: 2497 - DNA, 375 bp, Artificial Sequence; identical to SEQ ID NO: 65
  Description of Artificial Sequence: Synthetic Heavy chain variable region nucleic acid sequence

SEQ ID NO: 2498 - protein, 125 aa, Artificial Sequence; identical to SEQ ID NO: 66
  Description of Artificial Sequence: Synthetic Heavy chain variable region amino acid sequence

SEQ ID NO: 2499 - protein, 9 aa, Artificial Sequence
  Description of Artificial Sequence: Synthetic Heavy chain variable region CDR H1 amino acid sequence
FTFDTYAMN

SEQ ID NO: 2500 - DNA, 27 bp, Artificial Sequence
  Description of Artificial Sequence: Synthetic Heavy chain variable region CDR H1 nucleic acid sequence
ttcacctttgacacatatgccatgaat

SEQ ID NO: 2501 - protein, 19 aa, Artificial Sequence
  Description of Artificial Sequence: Synthetic Heavy chain variable region CDR H2 amino acid sequence
RIRSKYNNYATYYADSVKG

SEQ ID NO: 2502 - DNA, 57 bp, Artificial Sequence; identical to SEQ ID NO: 70
  Description of Artificial Sequence: Synthetic Heavy chain variable region CDR H2 nucleic acid sequence

SEQ ID NO: 2503 - protein, 16 aa, Artificial Sequence
  Description of Artificial Sequence: Synthetic Heavy chain variable region CDR H3 amino acid sequence
VRHGNFGNSYVSWFAH

SEQ ID NO: 2504 - DNA, 48 bp, Artificial Sequence; identical to SEQ ID NO: 72
  Description of Artificial Sequence: Synthetic Heavy chain variable region CDR H3 nucleic acid sequence

SEQ ID NO: 2505 - DNA, 327 bp, Artificial Sequence
  Description of Artificial Sequence: Synthetic Light chain variable region nucleic acid sequence
cagactgtggtgacccaggagccatcgctctcagtgtcccctggagggacagtcacactcacttgtggatcaagcgctggcgcagtcactactagtaactacgccaactgggtccagcagaccccaggccaggctccacgcggactcatcggcggcacagacaagcgcgctcctggggtccctgatcgcttctctggctccctgcttggggacaaagctgccctcaccatcacgggggcccaggcagaggatgaagctgattattactgtgcgctgtggtacagtaacctttgggtgttcggcggagggaccaagctgaccgtccta

SEQ ID NO: 2506 - protein, 109 aa, Artificial Sequence
  Description of Artificial Sequence: Synthetic Light chain variable region amino acid sequence
QTVVTQEPSLSVSPGGTVTLTCGSSAGAVTTSNYANWVQQTPGQAPRGLIGGTDKRAPGVPDRFSGSLLGDKAALTITGAQAEDEADYYCALWYSNLWVFGGGTKLTVL

SEQ ID NO: 2507 - protein, 14 aa, Artificial Sequence
  Description of Artificial Sequence: Synthetic Light chain variable region CDR L1 amino acid sequence
GSSAGAVTTSNYAN

SEQ ID NO: 2508 - DNA, 42 bp, Artificial Sequence; identical to SEQ ID NO: 236
  Description of Artificial Sequence: Synthetic Light chain variable region CDR L1 nucleic acid sequence

SEQ ID NO: 2509 - protein, 7 aa, Artificial Sequence
  Description of Artificial Sequence: Synthetic Light chain variable region CDR L2 amino acid sequence
GTDKRAP

SEQ ID NO: 2510 - DNA, 21 bp, Artificial Sequence
  Description of Artificial Sequence: Synthetic Light chain variable region CDR L2 nucleic acid sequence
ggcacagacaagcgcgctcct

SEQ ID NO: 2511 - protein, 9 aa, Artificial Sequence
  Description of Artificial Sequence: Synthetic Light chain variable region CDR L3 amino acid sequence
ALWYSNLWV

SEQ ID NO: 2512 - DNA, 27 bp, Artificial Sequence
  Description of Artificial Sequence: Synthetic Light chain variable region CDR L3 nucleic acid sequence
gcgctgtggtacagtaacctttgggtg

SEQ ID NO: 2513 - DNA, 375 bp, Artificial Sequence; identical to SEQ ID NO: 65
  Description of Artificial Sequence: Synthetic Heavy chain variable region nucleic acid sequence

SEQ ID NO: 2514 - protein, 125 aa, Artificial Sequence; identical to SEQ ID NO: 66
  Description of Artificial Sequence: Synthetic Heavy chain variable region amino acid sequence

SEQ ID NO: 2515 - protein, 9 aa, Artificial Sequence
  Description of Artificial Sequence: Synthetic Heavy chain variable region CDR H1 amino acid sequence
FTFDTYAMN

SEQ ID NO: 2516 - DNA, 27 bp, Artificial Sequence
  Description of Artificial Sequence: Synthetic Heavy chain variable region CDR H1 nucleic acid sequence
ttcacctttgacacatatgccatgaat

SEQ ID NO: 2517 - protein, 19 aa, Artificial Sequence
  Description of Artificial Sequence: Synthetic Heavy chain variable region CDR H2 amino acid sequence
RIRSKYNNYATYYADSVKG

SEQ ID NO: 2518 - DNA, 57 bp, Artificial Sequence; identical to SEQ ID NO: 70
  Description of Artificial Sequence: Synthetic Heavy chain variable region CDR H2 nucleic acid sequence

SEQ ID NO: 2519 - protein, 16 aa, Artificial Sequence
  Description of Artificial Sequence: Synthetic Heavy chain variable region CDR H3 amino acid sequence
VRHGNFGNSYVSWFAH

SEQ ID NO: 2520 - DNA, 48 bp, Artificial Sequence; identical to SEQ ID NO: 72
  Description of Artificial Sequence: Synthetic Heavy chain variable region CDR H3 nucleic acid sequence

SEQ ID NO: 2521 - DNA, 327 bp, Artificial Sequence; identical to SEQ ID NO: 377
  Description of Artificial Sequence: Synthetic Light chain variable region nucleic acid sequence

SEQ ID NO: 2522 - protein, 109 aa, Artificial Sequence; identical to SEQ ID NO: 378
  Description of Artificial Sequence: Synthetic Light chain variable region amino acid sequence

SEQ ID NO: 2523 - protein, 14 aa, Artificial Sequence
  Description of Artificial Sequence: Synthetic Light chain variable region CDR L1 amino acid sequence
GSSAGAVTTSNYAN

SEQ ID NO: 2524 - DNA, 42 bp, Artificial Sequence; identical to SEQ ID NO: 236
  Description of Artificial Sequence: Synthetic Light chain variable region CDR L1 nucleic acid sequence

SEQ ID NO: 2525 - protein, 7 aa, Artificial Sequence
  Description of Artificial Sequence: Synthetic Light chain variable region CDR L2 amino acid sequence
GTDKRAP

SEQ ID NO: 2526 - DNA, 21 bp, Artificial Sequence
  Description of Artificial Sequence: Synthetic Light chain variable region CDR L2 nucleic acid sequence
ggcacagacaagcgcgctcct

SEQ ID NO: 2527 - protein, 9 aa, Artificial Sequence
  Description of Artificial Sequence: Synthetic Light chain variable region CDR L3 amino acid sequence
ALWYNNLWV

SEQ ID NO: 2528 - DNA, 27 bp, Artificial Sequence
  Description of Artificial Sequence: Synthetic Light chain variable region CDR L3 nucleic acid sequence
gcgctgtggtacaataacctttgggtg

SEQ ID NO: 2529 - DNA, 375 bp, Artificial Sequence; identical to SEQ ID NO: 65
  Description of Artificial Sequence: Synthetic Heavy chain variable region nucleic acid sequence

SEQ ID NO: 2530 - protein, 125 aa, Artificial Sequence; identical to SEQ ID NO: 66
  Description of Artificial Sequence: Synthetic Heavy chain variable region amino acid sequence

SEQ ID NO: 2531 - protein, 9 aa, Artificial Sequence
  Description of Artificial Sequence: Synthetic Heavy chain variable region CDR H1 amino acid sequence
FTFDTYAMN

SEQ ID NO: 2532 - DNA, 27 bp, Artificial Sequence
  Description of Artificial Sequence: Synthetic Heavy chain variable region CDR H1 nucleic acid sequence
ttcacctttgacacatatgccatgaat

SEQ ID NO: 2533 - protein, 19 aa, Artificial Sequence
  Description of Artificial Sequence: Synthetic Heavy chain variable region CDR H2 amino acid sequence
RIRSKYNNYATYYADSVKG

SEQ ID NO: 2534 - DNA, 57 bp, Artificial Sequence; identical to SEQ ID NO: 70
  Description of Artificial Sequence: Synthetic Heavy chain variable region CDR H2 nucleic acid sequence

SEQ ID NO: 2535 - protein, 16 aa, Artificial Sequence
  Description of Artificial Sequence: Synthetic Heavy chain variable region CDR H3 amino acid sequence
VRHGNFGNSYVSWFAH

SEQ ID NO: 2536 - DNA, 48 bp, Artificial Sequence; identical to SEQ ID NO: 72
  Description of Artificial Sequence: Synthetic Heavy chain variable region CDR H3 nucleic acid sequence

SEQ ID NO: 2537 - DNA, 327 bp, Artificial Sequence; identical to SEQ ID NO: 1257
  Description of Artificial Sequence: Synthetic Light chain variable region nucleic acid sequence

SEQ ID NO: 2538 - protein, 109 aa, Artificial Sequence; identical to SEQ ID NO: 1258
  Description of Artificial Sequence: Synthetic Light chain variable region amino acid sequence

SEQ ID NO: 2539 - protein, 14 aa, Artificial Sequence
  Description of Artificial Sequence: Synthetic Light chain variable region CDR L1 amino acid sequence
GSSTGAVTTSNYAN

SEQ ID NO: 2540 - DNA, 42 bp, Artificial Sequence; identical to SEQ ID NO: 204
  Description of Artificial Sequence: Synthetic Light chain variable region CDR L1 nucleic acid sequence

SEQ ID NO: 2541 - protein, 7 aa, Artificial Sequence
  Description of Artificial Sequence: Synthetic Light chain variable region CDR L2 amino acid sequence
GTDKRAP

SEQ ID NO: 2542 - DNA, 21 bp, Artificial Sequence
  Description of Artificial Sequence: Synthetic Light chain variable region CDR L2 nucleic acid sequence
ggcacagacaagcgcgctcct

SEQ ID NO: 2543 - protein, 9 aa, Artificial Sequence
  Description of Artificial Sequence: Synthetic Light chain variable region CDR L3 amino acid sequence
ALWYSNLWV

SEQ ID NO: 2544 - DNA, 27 bp, Artificial Sequence
  Description of Artificial Sequence: Synthetic Light chain variable region CDR L3 nucleic acid sequence
gcgctgtggtacagtaacctttgggtg

SEQ ID NO: 2545 - DNA, 375 bp, Artificial Sequence; identical to SEQ ID NO: 65
  Description of Artificial Sequence: Synthetic Heavy chain variable region nucleic acid sequence

SEQ ID NO: 2546 - protein, 125 aa, Artificial Sequence; identical to SEQ ID NO: 66
  Description of Artificial Sequence: Synthetic Heavy chain variable region amino acid sequence

SEQ ID NO: 2547 - protein, 9 aa, Artificial Sequence
  Description of Artificial Sequence: Synthetic Heavy chain variable region CDR H1 amino acid sequence
FTFDTYAMN

SEQ ID NO: 2548 - DNA, 27 bp, Artificial Sequence
  Description of Artificial Sequence: Synthetic Heavy chain variable region CDR H1 nucleic acid sequence
ttcacctttgacacatatgccatgaat

SEQ ID NO: 2549 - protein, 19 aa, Artificial Sequence
  Description of Artificial Sequence: Synthetic Heavy chain variable region CDR H2 amino acid sequence
RIRSKYNNYATYYADSVKG

SEQ ID NO: 2550 - DNA, 57 bp, Artificial Sequence; identical to SEQ ID NO: 70
  Description of Artificial Sequence: Synthetic Heavy chain variable region CDR H2 nucleic acid sequence

SEQ ID NO: 2551 - protein, 16 aa, Artificial Sequence
  Description of Artificial Sequence: Synthetic Heavy chain variable region CDR H3 amino acid sequence
VRHGNFGNSYVSWFAH

SEQ ID NO: 2552 - DNA, 48 bp, Artificial Sequence; identical to SEQ ID NO: 72
  Description of Artificial Sequence: Synthetic Heavy chain variable region CDR H3 nucleic acid sequence

SEQ ID NO: 2553 - DNA, 327 bp, Artificial Sequence; identical to SEQ ID NO: 329
  Description of Artificial Sequence: Synthetic Light chain variable region nucleic acid sequence

SEQ ID NO: 2554 - protein, 109 aa, Artificial Sequence; identical to SEQ ID NO: 330
  Description of Artificial Sequence: Synthetic Light chain variable region amino acid sequence

SEQ ID NO: 2555 - protein, 14 aa, Artificial Sequence
  Description of Artificial Sequence: Synthetic Light chain variable region CDR L1 amino acid sequence
GSSTGAVTTSNYAN

SEQ ID NO: 2556 - DNA, 42 bp, Artificial Sequence; identical to SEQ ID NO: 204
  Description of Artificial Sequence: Synthetic Light chain variable region CDR L1 nucleic acid sequence

SEQ ID NO: 2557 - protein, 7 aa, Artificial Sequence
  Description of Artificial Sequence: Synthetic Light chain variable region CDR L2 amino acid sequence
GTDKRAP

SEQ ID NO: 2558 - DNA, 21 bp, Artificial Sequence
  Description of Artificial Sequence: Synthetic Light chain variable region CDR L2 nucleic acid sequence
ggcacagacaagcgcgctcct

SEQ ID NO: 2559 - protein, 9 aa, Artificial Sequence
  Description of Artificial Sequence: Synthetic Light chain variable region CDR L3 amino acid sequence
VLWYSNLWV

SEQ ID NO: 2560 - DNA, 27 bp, Artificial Sequence
  Description of Artificial Sequence: Synthetic Light chain variable region CDR L3 nucleic acid sequence
gtgctgtggtacagtaacctttgggtg

SEQ ID NO: 2561 - DNA, 375 bp, Artificial Sequence; identical to SEQ ID NO: 65
  Description of Artificial Sequence: Synthetic Heavy chain variable region nucleic acid sequence

SEQ ID NO: 2562 - protein, 125 aa, Artificial Sequence; identical to SEQ ID NO: 66
  Description of Artificial Sequence: Synthetic Heavy chain variable region amino acid sequence

SEQ ID NO: 2563 - protein, 9 aa, Artificial Sequence
  Description of Artificial Sequence: Synthetic Heavy chain variable region CDR H1 amino acid sequence
FTFDTYAMN

SEQ ID NO: 2564 - DNA, 27 bp, Artificial Sequence
  Description of Artificial Sequence: Synthetic Heavy chain variable region CDR H1 nucleic acid sequence
ttcacctttgacacatatgccatgaat

SEQ ID NO: 2565 - protein, 19 aa, Artificial Sequence
  Description of Artificial Sequence: Synthetic Heavy chain variable region CDR H2 amino acid sequence
RIRSKYNNYATYYADSVKG

SEQ ID NO: 2566 - DNA, 57 bp, Artificial Sequence; identical to SEQ ID NO: 70
  Description of Artificial Sequence: Synthetic Heavy chain variable region CDR H2 nucleic acid sequence

SEQ ID NO: 2567 - protein, 16 aa, Artificial Sequence
  Description of Artificial Sequence: Synthetic Heavy chain variable region CDR H3 amino acid sequence
VRHGNFGNSYVSWFAH

SEQ ID NO: 2568 - DNA, 48 bp, Artificial Sequence; identical to SEQ ID NO: 72
  Description of Artificial Sequence: Synthetic Heavy chain variable region CDR H3 nucleic acid sequence

SEQ ID NO: 2569 - DNA, 327 bp, Artificial Sequence; identical to SEQ ID NO: 345
  Description of Artificial Sequence: Synthetic Light chain variable region nucleic acid sequence

SEQ ID NO: 2570 - protein, 109 aa, Artificial Sequence; identical to SEQ ID NO: 346
  Description of Artificial Sequence: Synthetic Light chain variable region amino acid sequence

SEQ ID NO: 2571 - protein, 14 aa, Artificial Sequence
  Description of Artificial Sequence: Synthetic Light chain variable region CDR L1 amino acid sequence
GSSTGAVTTSNYAN

SEQ ID NO: 2572 - DNA, 42 bp, Artificial Sequence; identical to SEQ ID NO: 204
  Description of Artificial Sequence: Synthetic Light chain variable region CDR L1 nucleic acid sequence

SEQ ID NO: 2573 - protein, 7 aa, Artificial Sequence
  Description of Artificial Sequence: Synthetic Light chain variable region CDR L2 amino acid sequence
GTDKRAP

SEQ ID NO: 2574 - DNA, 21 bp, Artificial Sequence
  Description of Artificial Sequence: Synthetic Light chain variable region CDR L2 nucleic acid sequence
ggcacagacaagcgcgctcct

SEQ ID NO: 2575 - protein, 9 aa, Artificial Sequence
  Description of Artificial Sequence: Synthetic Light chain variable region CDR L3 amino acid sequence
ALWYSNHWV

SEQ ID NO: 2576 - DNA, 27 bp, Artificial Sequence
  Description of Artificial Sequence: Synthetic Light chain variable region CDR L3 nucleic acid sequence
gcgctgtggtacagtaaccattgggtg

SEQ ID NO: 2577 - DNA, 375 bp, Artificial Sequence; identical to SEQ ID NO: 65
  Description of Artificial Sequence: Synthetic Heavy chain variable region nucleic acid sequence

SEQ ID NO: 2578 - protein, 125 aa, Artificial Sequence; identical to SEQ ID NO: 66
  Description of Artificial Sequence: Synthetic Heavy chain variable region amino acid sequence

SEQ ID NO: 2579 - protein, 9 aa, Artificial Sequence
  Description of Artificial Sequence: Synthetic Heavy chain variable region CDR H1 amino acid sequence
FTFDTYAMN

SEQ ID NO: 2580 - DNA, 27 bp, Artificial Sequence
  Description of Artificial Sequence: Synthetic Heavy chain variable region CDR H1 nucleic acid sequence
ttcacctttgacacatatgccatgaat

SEQ ID NO: 2581 - protein, 19 aa, Artificial Sequence
  Description of Artificial Sequence: Synthetic Heavy chain variable region CDR H2 amino acid sequence
RIRSKYNNYATYYADSVKG

SEQ ID NO: 2582 - DNA, 57 bp, Artificial Sequence; identical to SEQ ID NO: 70
  Description of Artificial Sequence: Synthetic Heavy chain variable region CDR H2 nucleic acid sequence

SEQ ID NO: 2583 - protein, 16 aa, Artificial Sequence
  Description of Artificial Sequence: Synthetic Heavy chain variable region CDR H3 amino acid sequence
VRHGNFGNSYVSWFAH

SEQ ID NO: 2584 - DNA, 48 bp, Artificial Sequence; identical to SEQ ID NO: 72
  Description of Artificial Sequence: Synthetic Heavy chain variable region CDR H3 nucleic acid sequence

SEQ ID NO: 2585 - DNA, 327 bp, Artificial Sequence; identical to SEQ ID NO: 2329
  Description of Artificial Sequence: Synthetic Light chain variable region nucleic acid sequence

SEQ ID NO: 2586 - protein, 109 aa, Artificial Sequence; identical to SEQ ID NO: 2330
  Description of Artificial Sequence: Synthetic Light chain variable region amino acid sequence

SEQ ID NO: 2587 - protein, 14 aa, Artificial Sequence
  Description of Artificial Sequence: Synthetic Light chain variable region CDR L1 amino acid sequence
GSSTGAVTTSNYAN

SEQ ID NO: 2588 - DNA, 42 bp, Artificial Sequence; identical to SEQ ID NO: 204
  Description of Artificial Sequence: Synthetic Light chain variable region CDR L1 nucleic acid sequence

SEQ ID NO: 2589 - protein, 7 aa, Artificial Sequence
  Description of Artificial Sequence: Synthetic Light chain variable region CDR L2 amino acid sequence
GTDKRAP

SEQ ID NO: 2590 - DNA, 21 bp, Artificial Sequence
  Description of Artificial Sequence: Synthetic Light chain variable region CDR L2 nucleic acid sequence
ggcacagacaagcgcgctcct

SEQ ID NO: 2591 - protein, 9 aa, Artificial Sequence
  Description of Artificial Sequence: Synthetic Light chain variable region CDR L3 amino acid sequence
VLWYNNLWV

SEQ ID NO: 2592 - DNA, 27 bp, Artificial Sequence
  Description of Artificial Sequence: Synthetic Light chain variable region CDR L3 nucleic acid sequence
gtgctgtggtacaataacctttgggtg

SEQ ID NO: 2593 - DNA, 375 bp, Artificial Sequence; identical to SEQ ID NO: 65
  Description of Artificial Sequence: Synthetic Heavy chain variable region nucleic acid sequence

SEQ ID NO: 2594 - protein, 125 aa, Artificial Sequence; identical to SEQ ID NO: 66
  Description of Artificial Sequence: Synthetic Heavy chain variable region amino acid sequence

SEQ ID NO: 2595 - protein, 9 aa, Artificial Sequence
  Description of Artificial Sequence: Synthetic Heavy chain variable region CDR H1 amino acid sequence
FTFDTYAMN

SEQ ID NO: 2596 - DNA, 27 bp, Artificial Sequence
  Description of Artificial Sequence: Synthetic Heavy chain variable region CDR H1 nucleic acid sequence
ttcacctttgacacatatgccatgaat

SEQ ID NO: 2597 - protein, 19 aa, Artificial Sequence
  Description of Artificial Sequence: Synthetic Heavy chain variable region CDR H2 amino acid sequence
RIRSKYNNYATYYADSVKG

SEQ ID NO: 2598 - DNA, 57 bp, Artificial Sequence; identical to SEQ ID NO: 70
  Description of Artificial Sequence: Synthetic Heavy chain variable region CDR H2 nucleic acid sequence

SEQ ID NO: 2599 - protein, 16 aa, Artificial Sequence
  Description of Artificial Sequence: Synthetic Heavy chain variable region CDR H3 amino acid sequence
VRHGNFGNSYVSWFAH

SEQ ID NO: 2600 - DNA, 48 bp, Artificial Sequence; identical to SEQ ID NO: 72
  Description of Artificial Sequence: Synthetic Heavy chain variable region CDR H3 nucleic acid sequence

SEQ ID NO: 2601 - DNA, 327 bp, Artificial Sequence; identical to SEQ ID NO: 2425
  Description of Artificial Sequence: Synthetic Light chain variable region nucleic acid sequence

SEQ ID NO: 2602 - protein, 109 aa, Artificial Sequence; identical to SEQ ID NO: 2426
  Description of Artificial Sequence: Synthetic Light chain variable region amino acid sequence

SEQ ID NO: 2603 - protein, 14 aa, Artificial Sequence
  Description of Artificial Sequence: Synthetic Light chain variable region CDR L1 amino acid sequence
GSSTGAVTTSNYAN

SEQ ID NO: 2604 - DNA, 42 bp, Artificial Sequence; identical to SEQ ID NO: 204
  Description of Artificial Sequence: Synthetic Light chain variable region CDR L1 nucleic acid sequence

SEQ ID NO: 2605 - protein, 7 aa, Artificial Sequence
  Description of Artificial Sequence: Synthetic Light chain variable region CDR L2 amino acid sequence
GTDKRAP

SEQ ID NO: 2606 - DNA, 21 bp, Artificial Sequence
  Description of Artificial Sequence: Synthetic Light chain variable region CDR L2 nucleic acid sequence
ggcacagacaagcgcgctcct

SEQ ID NO: 2607 - protein, 9 aa, Artificial Sequence
  Description of Artificial Sequence: Synthetic Light chain variable region CDR L3 amino acid sequence
VLWYSNHWV

SEQ ID NO: 2608 - DNA, 27 bp, Artificial Sequence
  Description of Artificial Sequence: Synthetic Light chain variable region CDR L3 nucleic acid sequence
gtgctgtggtacagtaaccattgggtg

SEQ ID NO: 2609 - DNA, 375 bp, Artificial Sequence; identical to SEQ ID NO: 65
  Description of Artificial Sequence: Synthetic Heavy chain variable region nucleic acid sequence

SEQ ID NO: 2610 - protein, 125 aa, Artificial Sequence; identical to SEQ ID NO: 66
  Description of Artificial Sequence: Synthetic Heavy chain variable region amino acid sequence

SEQ ID NO: 2611 - protein, 9 aa, Artificial Sequence
  Description of Artificial Sequence: Synthetic Heavy chain variable region CDR H1 amino acid sequence
FTFDTYAMN

SEQ ID NO: 2612 - DNA, 27 bp, Artificial Sequence
  Description of Artificial Sequence: Synthetic Heavy chain variable region CDR H1 nucleic acid sequence
ttcacctttgacacatatgccatgaat

SEQ ID NO: 2613 - protein, 19 aa, Artificial Sequence
  Description of Artificial Sequence: Synthetic Heavy chain variable region CDR H2 amino acid sequence
RIRSKYNNYATYYADSVKG

SEQ ID NO: 2614 - DNA, 57 bp, Artificial Sequence; identical to SEQ ID NO: 70
  Description of Artificial Sequence: Synthetic Heavy chain variable region CDR H2 nucleic acid sequence

SEQ ID NO: 2615 - protein, 16 aa, Artificial Sequence
  Description of Artificial Sequence: Synthetic Heavy chain variable region CDR H3 amino acid sequence
VRHGNFGNSYVSWFAH

SEQ ID NO: 2616 - DNA, 48 bp, Artificial Sequence; identical to SEQ ID NO: 72
  Description of Artificial Sequence: Synthetic Heavy chain variable region CDR H3 nucleic acid sequence

SEQ ID NO: 2617 - DNA, 327 bp, Artificial Sequence; identical to SEQ ID NO: 2281
  Description of Artificial Sequence: Synthetic Light chain variable region nucleic acid sequence

SEQ ID NO: 2618 - protein, 109 aa, Artificial Sequence; identical to SEQ ID NO: 2282
  Description of Artificial Sequence: Synthetic Light chain variable region amino acid sequence

SEQ ID NO: 2619 - protein, 14 aa, Artificial Sequence
  Description of Artificial Sequence: Synthetic Light chain variable region CDR L1 amino acid sequence
GSSTGAVTTSNYAN

SEQ ID NO: 2620 - DNA, 42 bp, Artificial Sequence; identical to SEQ ID NO: 204
  Description of Artificial Sequence: Synthetic Light chain variable region CDR L1 nucleic acid sequence

SEQ ID NO: 2621 - protein, 7 aa, Artificial Sequence
  Description of Artificial Sequence: Synthetic Light chain variable region CDR L2 amino acid sequence
GTDKRAP

SEQ ID NO: 2622 - DNA, 21 bp, Artificial Sequence
  Description of Artificial Sequence: Synthetic Light chain variable region CDR L2 nucleic acid sequence
ggcacagacaagcgcgctcct

SEQ ID NO: 2623 - protein, 9 aa, Artificial Sequence
  Description of Artificial Sequence: Synthetic Light chain variable region CDR L3 amino acid sequence
ALWYSNHWV

SEQ ID NO: 2624 - DNA, 27 bp, Artificial Sequence
  Description of Artificial Sequence: Synthetic Light chain variable region CDR L3 nucleic acid sequence
gcgctgtggtacagtaaccattgggtg

SEQ ID NO: 2625 - DNA, 375 bp, Artificial Sequence; identical to SEQ ID NO: 145
  Description of Artificial Sequence: Synthetic Heavy chain variable region nucleic acid sequence

SEQ ID NO: 2626 - protein, 125 aa, Artificial Sequence; identical to SEQ ID NO: 146
  Description of Artificial Sequence: Synthetic Heavy chain variable region amino acid sequence

SEQ ID NO: 2627 - protein, 9 aa, Artificial Sequence
  Description of Artificial Sequence: Synthetic Heavy chain variable region CDR H1 amino acid sequence
FTFDTYAMN

SEQ ID NO: 2628 - DNA, 27 bp, Artificial Sequence
  Description of Artificial Sequence: Synthetic Heavy chain variable region CDR H1 nucleic acid sequence
ttcacctttgacacatatgccatgaat

SEQ ID NO: 2629 - protein, 19 aa, Artificial Sequence
  Description of Artificial Sequence: Synthetic Heavy chain variable region CDR H2 amino acid sequence
RIRSKYNNYATYYADSVKD

SEQ ID NO: 2630 - DNA, 57 bp, Artificial Sequence; identical to SEQ ID NO: 6
  Description of Artificial Sequence: Synthetic Heavy chain variable region CDR H2 nucleic acid sequence

SEQ ID NO: 2631 - protein, 16 aa, Artificial Sequence
  Description of Artificial Sequence: Synthetic Heavy chain variable region CDR H3 amino acid sequence
VRHSNFGNSYVSWFAH

SEQ ID NO: 2632 - DNA, 48 bp, Artificial Sequence; identical to SEQ ID NO: 152
  Description of Artificial Sequence: Synthetic Heavy chain variable region CDR H3 nucleic acid sequence

SEQ ID NO: 2633 - DNA, 327 bp, Artificial Sequence; identical to SEQ ID NO: 2297
  Description of Artificial Sequence: Synthetic Light chain variable region nucleic acid sequence

SEQ ID NO: 2634 - protein, 109 aa, Artificial Sequence; identical to SEQ ID NO: 2298
  Description of Artificial Sequence: Synthetic Light chain variable region amino acid sequence

SEQ ID NO: 2635 - protein, 14 aa, Artificial Sequence
  Description of Artificial Sequence: Synthetic Light chain variable region CDR L1 amino acid sequence
GSSTGAVTTSNYAN

SEQ ID NO: 2636 - DNA, 42 bp, Artificial Sequence; identical to SEQ ID NO: 204
  Description of Artificial Sequence: Synthetic Light chain variable region CDR L1 nucleic acid sequence

SEQ ID NO: 2637 - protein, 7 aa, Artificial Sequence
  Description of Artificial Sequence: Synthetic Light chain variable region CDR L2 amino acid sequence
GTDKRAP

SEQ ID NO: 2638 - DNA, 21 bp, Artificial Sequence
  Description of Artificial Sequence: Synthetic Light chain variable region CDR L2 nucleic acid sequence
ggcacagacaagcgcgctcct

SEQ ID NO: 2639 - protein, 9 aa, Artificial Sequence
  Description of Artificial Sequence: Synthetic Light chain variable region CDR L3 amino acid sequence
ALWYSNLWV

SEQ ID NO: 2640 - DNA, 27 bp, Artificial Sequence
  Description of Artificial Sequence: Synthetic Light chain variable region CDR L3 nucleic acid sequence
gcgctgtggtacagtaacctttgggtg

SEQ ID NO: 2641 - DNA, 375 bp, Artificial Sequence; identical to SEQ ID NO: 145
  Description of Artificial Sequence: Synthetic Heavy chain variable region nucleic acid sequence

SEQ ID NO: 2642 - protein, 125 aa, Artificial Sequence; identical to SEQ ID NO: 146
  Description of Artificial Sequence: Synthetic Heavy chain variable region amino acid sequence

SEQ ID NO: 2643 - protein, 9 aa, Artificial Sequence
  Description of Artificial Sequence: Synthetic Heavy chain variable region CDR H1 amino acid sequence
FTFDTYAMN

SEQ ID NO: 2644 - DNA, 27 bp, Artificial Sequence
  Description of Artificial Sequence: Synthetic Heavy chain variable region CDR H1 nucleic acid sequence
ttcacctttgacacatatgccatgaat

SEQ ID NO: 2645 - protein, 19 aa, Artificial Sequence
  Description of Artificial Sequence: Synthetic Heavy chain variable region CDR H2 amino acid sequence
RIRSKYNNYATYYADSVKD

SEQ ID NO: 2646 - DNA, 57 bp, Artificial Sequence; identical to SEQ ID NO: 6
  Description of Artificial Sequence: Synthetic Heavy chain variable region CDR H2 nucleic acid sequence

SEQ ID NO: 2647 - protein, 16 aa, Artificial Sequence
  Description of Artificial Sequence: Synthetic Heavy chain variable region CDR H3 amino acid sequence
VRHSNFGNSYVSWFAH

SEQ ID NO: 2648 - DNA, 48 bp, Artificial Sequence; identical to SEQ ID NO: 152
  Description of Artificial Sequence: Synthetic Heavy chain variable region CDR H3 nucleic acid sequence

SEQ ID NO: 2649 - DNA, 327 bp, Artificial Sequence; identical to SEQ ID NO: 2313
  Description of Artificial Sequence: Synthetic Light chain variable region nucleic acid sequence

SEQ ID NO: 2650 - protein, 109 aa, Artificial Sequence; identical to SEQ ID NO: 2314
  Description of Artificial Sequence: Synthetic Light chain variable region amino acid sequence

SEQ ID NO: 2651 - protein, 14 aa, Artificial Sequence
  Description of Artificial Sequence: Synthetic Light chain variable region CDR L1 amino acid sequence
GSSTGAVTTSNYAN

SEQ ID NO: 2652 - DNA, 42 bp, Artificial Sequence; identical to SEQ ID NO: 204
  Description of Artificial Sequence: Synthetic Light chain variable region CDR L1 nucleic acid sequence

SEQ ID NO: 2653 - protein, 7 aa, Artificial Sequence
  Description of Artificial Sequence: Synthetic Light chain variable region CDR L2 amino acid sequence
GTDKRAP

SEQ ID NO: 2654 - DNA, 21 bp, Artificial Sequence
  Description of Artificial Sequence: Synthetic Light chain variable region CDR L2 nucleic acid sequence
ggcacagacaagcgcgctcct

SEQ ID NO: 2655 - protein, 9 aa, Artificial Sequence
  Description of Artificial Sequence: Synthetic Light chain variable region CDR L3 amino acid sequence
ALWYNNLWV

SEQ ID NO: 2656 - DNA, 27 bp, Artificial Sequence
  Description of Artificial Sequence: Synthetic Light chain variable region CDR L3 nucleic acid sequence
gcgctgtggtacaataacctttgggtg

SEQ ID NO: 2657 - DNA, 375 bp, Artificial Sequence; identical to SEQ ID NO: 145
  Description of Artificial Sequence: Synthetic Heavy chain variable region nucleic acid sequence

SEQ ID NO: 2658 - protein, 125 aa, Artificial Sequence; identical to SEQ ID NO: 146
  Description of Artificial Sequence: Synthetic Heavy chain variable region amino acid sequence

SEQ ID NO: 2659 - protein, 9 aa, Artificial Sequence
  Description of Artificial Sequence: Synthetic Heavy chain variable region CDR H1 amino acid sequence
FTFDTYAMN

SEQ ID NO: 2660 - DNA, 27 bp, Artificial Sequence
  Description of Artificial Sequence: Synthetic Heavy chain variable region CDR H1 nucleic acid sequence
ttcacctttgacacatatgccatgaat

SEQ ID NO: 2661 - protein, 19 aa, Artificial Sequence
  Description of Artificial Sequence: Synthetic Heavy chain variable region CDR H2 amino acid sequence
RIRSKYNNYATYYADSVKD

SEQ ID NO: 2662 - DNA, 57 bp, Artificial Sequence; identical to SEQ ID NO: 6
  Description of Artificial Sequence: Synthetic Heavy chain variable region CDR H2 nucleic acid sequence

SEQ ID NO: 2663 - protein, 16 aa, Artificial Sequence
  Description of Artificial Sequence: Synthetic Heavy chain variable region CDR H3 amino acid sequence
VRHSNFGNSYVSWFAH

SEQ ID NO: 2664 - DNA, 48 bp, Artificial Sequence; identical to SEQ ID NO: 152
  Description of Artificial Sequence: Synthetic Heavy chain variable region CDR H3 nucleic acid sequence

SEQ ID NO: 2665 - DNA, 327 bp, Artificial Sequence; identical to SEQ ID NO: 2505
  Description of Artificial Sequence: Synthetic Light chain variable region nucleic acid sequence

SEQ ID NO: 2666 - protein, 109 aa, Artificial Sequence; identical to SEQ ID NO: 2506
  Description of Artificial Sequence: Synthetic Light chain variable region amino acid sequence

SEQ ID NO: 2667 - protein, 14 aa, Artificial Sequence
  Description of Artificial Sequence: Synthetic Light chain variable region CDR L1 amino acid sequence
GSSAGAVTTSNYAN

SEQ ID NO: 2668 - DNA, 42 bp, Artificial Sequence; identical to SEQ ID NO: 236
  Description of Artificial Sequence: Synthetic Light chain variable region CDR L1 nucleic acid sequence

SEQ ID NO: 2669 - protein, 7 aa, Artificial Sequence
  Description of Artificial Sequence: Synthetic Light chain variable region CDR L2 amino acid sequence
GTDKRAP

SEQ ID NO: 2670 - DNA, 21 bp, Artificial Sequence
  Description of Artificial Sequence: Synthetic Light chain variable region CDR L2 nucleic acid sequence
ggcacagacaagcgcgctcct

SEQ ID NO: 2671 - protein, 9 aa, Artificial Sequence
  Description of Artificial Sequence: Synthetic Light chain variable region CDR L3 amino acid sequence
ALWYSNLWV

SEQ ID NO: 2672 - DNA, 27 bp, Artificial Sequence
  Description of Artificial Sequence: Synthetic Light chain variable region CDR L3 nucleic acid sequence
gcgctgtggtacagtaacctttgggtg

SEQ ID NO: 2673 - DNA, 375 bp, Artificial Sequence; identical to SEQ ID NO: 145
  Description of Artificial Sequence: Synthetic Heavy chain variable region nucleic acid sequence

SEQ ID NO: 2674 - protein, 125 aa, Artificial Sequence; identical to SEQ ID NO: 146
  Description of Artificial Sequence: Synthetic Heavy chain variable region amino acid sequence

SEQ ID NO: 2675 - protein, 9 aa, Artificial Sequence
  Description of Artificial Sequence: Synthetic Heavy chain variable region CDR H1 amino acid sequence
FTFDTYAMN

SEQ ID NO: 2676 - DNA, 27 bp, Artificial Sequence
  Description of Artificial Sequence: Synthetic Heavy chain variable region CDR H1 nucleic acid sequence
ttcacctttgacacatatgccatgaat

SEQ ID NO: 2677 - protein, 19 aa, Artificial Sequence
  Description of Artificial Sequence: Synthetic Heavy chain variable region CDR H2 amino acid sequence
RIRSKYNNYATYYADSVKD

SEQ ID NO: 2678 - DNA, 57 bp, Artificial Sequence; identical to SEQ ID NO: 6
  Description of Artificial Sequence: Synthetic Heavy chain variable region CDR H2 nucleic acid sequence

SEQ ID NO: 2679 - protein, 16 aa, Artificial Sequence
  Description of Artificial Sequence: Synthetic Heavy chain variable region CDR H3 amino acid sequence
VRHSNFGNSYVSWFAH

SEQ ID NO: 2680 - DNA, 48 bp, Artificial Sequence; identical to SEQ ID NO: 152
  Description of Artificial Sequence: Synthetic Heavy chain variable region CDR H3 nucleic acid sequence

SEQ ID NO: 2681 - DNA, 327 bp, Artificial Sequence; identical to SEQ ID NO: 1257
  Description of Artificial Sequence: Synthetic Light chain variable region nucleic acid sequence

SEQ ID NO: 2682 - protein, 109 aa, Artificial Sequence; identical to SEQ ID NO: 1258
  Description of Artificial Sequence: Synthetic Light chain variable region amino acid sequence

SEQ ID NO: 2683 - protein, 14 aa, Artificial Sequence
  Description of Artificial Sequence: Synthetic Light chain variable region CDR L1 amino acid sequence
GSSTGAVTTSNYAN

SEQ ID NO: 2684 - DNA, 42 bp, Artificial Sequence; identical to SEQ ID NO: 204
  Description of Artificial Sequence: Synthetic Light chain variable region CDR L1 nucleic acid sequence

SEQ ID NO: 2685 - protein, 7 aa, Artificial Sequence
  Description of Artificial Sequence: Synthetic Light chain variable region CDR L2 amino acid sequence
GTDKRAP

SEQ ID NO: 2686 - DNA, 21 bp, Artificial Sequence
  Description of Artificial Sequence: Synthetic Light chain variable region CDR L2 nucleic acid sequence
ggcacagacaagcgcgctcct

SEQ ID NO: 2687 - protein, 9 aa, Artificial Sequence
  Description of Artificial Sequence: Synthetic Light chain variable region CDR L3 amino acid sequence
ALWYSNLWV

SEQ ID NO: 2688 - DNA, 27 bp, Artificial Sequence
  Description of Artificial Sequence: Synthetic Light chain variable region CDR L3 nucleic acid sequence
gcgctgtggtacagtaacctttgggtg

SEQ ID NO: 2689 - DNA, 375 bp, Artificial Sequence; identical to SEQ ID NO: 145
  Description of Artificial Sequence: Synthetic Heavy chain variable region nucleic acid sequence

SEQ ID NO: 2690 - protein, 125 aa, Artificial Sequence; identical to SEQ ID NO: 146
  Description of Artificial Sequence: Synthetic Heavy chain variable region amino acid sequence

SEQ ID NO: 2691 - protein, 9 aa, Artificial Sequence
  Description of Artificial Sequence: Synthetic Heavy chain variable region CDR H1 amino acid sequence
FTFDTYAMN

SEQ ID NO: 2692 - DNA, 27 bp, Artificial Sequence
  Description of Artificial Sequence: Synthetic Heavy chain variable region CDR H1 nucleic acid sequence
ttcacctttgacacatatgccatgaat

SEQ ID NO: 2693 - protein, 19 aa, Artificial Sequence
  Description of Artificial Sequence: Synthetic Heavy chain variable region CDR H2 amino acid sequence
RIRSKYNNYATYYADSVKD

SEQ ID NO: 2694 - DNA, 57 bp, Artificial Sequence; identical to SEQ ID NO: 6
  Description of Artificial Sequence: Synthetic Heavy chain variable region CDR H2 nucleic acid sequence

SEQ ID NO: 2695 - protein, 16 aa, Artificial Sequence
  Description of Artificial Sequence: Synthetic Heavy chain variable region CDR H3 amino acid sequence
VRHSNFGNSYVSWFAH

SEQ ID NO: 2696 - DNA, 48 bp, Artificial Sequence; identical to SEQ ID NO: 152
  Description of Artificial Sequence: Synthetic Heavy chain variable region CDR H3 nucleic acid sequence

SEQ ID NO: 2697 - DNA, 327 bp, Artificial Sequence; identical to SEQ ID NO: 2409
  Description of Artificial Sequence: Synthetic Light chain variable region nucleic acid sequence

SEQ ID NO: 2698 - protein, 109 aa, Artificial Sequence; identical to SEQ ID NO: 2410
  Description of Artificial Sequence: Synthetic Light chain variable region amino acid sequence

SEQ ID NO: 2699 - protein, 14 aa, Artificial Sequence
  Description of Artificial Sequence: Synthetic Light chain variable region CDR L1 amino acid sequence
GSSTGAVTTSNYAN

SEQ ID NO: 2700 - DNA, 42 bp, Artificial Sequence; identical to SEQ ID NO: 204
  Description of Artificial Sequence: Synthetic Light chain variable region CDR L1 nucleic acid sequence

SEQ ID NO: 2701 - protein, 7 aa, Artificial Sequence
  Description of Artificial Sequence: Synthetic Light chain variable region CDR L2 amino acid sequence
GTDKRAP

SEQ ID NO: 2702 - DNA, 21 bp, Artificial Sequence
  Description of Artificial Sequence: Synthetic Light chain variable region CDR L2 nucleic acid sequence
ggcacagacaagcgcgctcct

SEQ ID NO: 2703 - protein, 9 aa, Artificial Sequence
  Description of Artificial Sequence: Synthetic Light chain variable region CDR L3 amino acid sequence
ALWYNNLWV

SEQ ID NO: 2704 - DNA, 27 bp, Artificial Sequence
  Description of Artificial Sequence: Synthetic Light chain variable region CDR L3 nucleic acid sequence
gcgctgtggtacaataacctttgggtg

SEQ ID NO: 2705 - DNA, 375 bp, Artificial Sequence; identical to SEQ ID NO: 145
  Description of Artificial Sequence: Synthetic Heavy chain variable region nucleic acid sequence

SEQ ID NO: 2706 - protein, 125 aa, Artificial Sequence; identical to SEQ ID NO: 146
  Description of Artificial Sequence: Synthetic Heavy chain variable region amino acid sequence

SEQ ID NO: 2707 - protein, 9 aa, Artificial Sequence
  Description of Artificial Sequence: Synthetic Heavy chain variable region CDR H1 amino acid sequence
FTFDTYAMN

SEQ ID NO: 2708 - DNA, 27 bp, Artificial Sequence
  Description of Artificial Sequence: Synthetic Heavy chain variable region CDR H1 nucleic acid sequence
ttcacctttgacacatatgccatgaat

SEQ ID NO: 2709 - protein, 19 aa, Artificial Sequence
  Description of Artificial Sequence: Synthetic Heavy chain variable region CDR H2 amino acid sequence
RIRSKYNNYATYYADSVKD

SEQ ID NO: 2710 - DNA, 57 bp, Artificial Sequence; identical to SEQ ID NO: 6
  Description of Artificial Sequence: Synthetic Heavy chain variable region CDR H2 nucleic acid sequence

SEQ ID NO: 2711 - protein, 16 aa, Artificial Sequence
  Description of Artificial Sequence: Synthetic Heavy chain variable region CDR H3 amino acid sequence
VRHSNFGNSYVSWFAH

SEQ ID NO: 2712 - DNA, 48 bp, Artificial Sequence; identical to SEQ ID NO: 152
  Description of Artificial Sequence: Synthetic Heavy chain variable region CDR H3 nucleic acid sequence

SEQ ID NO: 2713 - DNA, 327 bp, Artificial Sequence; identical to SEQ ID NO: 329
  Description of Artificial Sequence: Synthetic Light chain variable region nucleic acid sequence

SEQ ID NO: 2714 - protein, 109 aa, Artificial Sequence; identical to SEQ ID NO: 330
  Description of Artificial Sequence: Synthetic Light chain variable region amino acid sequence

SEQ ID NO: 2715 - protein, 14 aa, Artificial Sequence
  Description of Artificial Sequence: Synthetic Light chain variable region CDR L1 amino acid sequence
GSSTGAVTTSNYAN

SEQ ID NO: 2716 - DNA, 42 bp, Artificial Sequence; identical to SEQ ID NO: 204
  Description of Artificial Sequence: Synthetic Light chain variable region CDR L1 nucleic acid sequence

SEQ ID NO: 2717 - protein, 7 aa, Artificial Sequence
  Description of Artificial Sequence: Synthetic Light chain variable region CDR L2 amino acid sequence
GTDKRAP

SEQ ID NO: 2718 - DNA, 21 bp, Artificial Sequence
  Description of Artificial Sequence: Synthetic Light chain variable region CDR L2 nucleic acid sequence
ggcacagacaagcgcgctcct

SEQ ID NO: 2719 - protein, 9 aa, Artificial Sequence
  Description of Artificial Sequence: Synthetic Light chain variable region CDR L3 amino acid sequence
VLWYSNLWV

SEQ ID NO: 2720 - DNA, 27 bp, Artificial Sequence
  Description of Artificial Sequence: Synthetic Light chain variable region CDR L3 nucleic acid sequence
gtgctgtggtacagtaacctttgggtg

SEQ ID NO: 2721 - DNA, 375 bp, Artificial Sequence; identical to SEQ ID NO: 145
  Description of Artificial Sequence: Synthetic Heavy chain variable region nucleic acid sequence

SEQ ID NO: 2722 - protein, 125 aa, Artificial Sequence; identical to SEQ ID NO: 146
  Description of Artificial Sequence: Synthetic Heavy chain variable region amino acid sequence

SEQ ID NO: 2723 - protein, 9 aa, Artificial Sequence
  Description of Artificial Sequence: Synthetic Heavy chain variable region CDR H1 amino acid sequence
FTFDTYAMN

SEQ ID NO: 2724 - DNA, 27 bp, Artificial Sequence
  Description of Artificial Sequence: Synthetic Heavy chain variable region CDR H1 nucleic acid sequence
ttcacctttgacacatatgccatgaat

SEQ ID NO: 2725 - protein, 19 aa, Artificial Sequence
  Description of Artificial Sequence: Synthetic Heavy chain variable region CDR H2 amino acid sequence
RIRSKYNNYATYYADSVKD

SEQ ID NO: 2726 - DNA, 57 bp, Artificial Sequence; identical to SEQ ID NO: 6
  Description of Artificial Sequence: Synthetic Heavy chain variable region CDR H2 nucleic acid sequence

SEQ ID NO: 2727 - protein, 16 aa, Artificial Sequence
  Description of Artificial Sequence: Synthetic Heavy chain variable region CDR H3 amino acid sequence
VRHSNFGNSYVSWFAH

SEQ ID NO: 2728 - DNA, 48 bp, Artificial Sequence; identical to SEQ ID NO: 152
  Description of Artificial Sequence: Synthetic Heavy chain variable region CDR H3 nucleic acid sequence

SEQ ID NO: 2729 - DNA, 327 bp, Artificial Sequence; identical to SEQ ID NO: 345
  Description of Artificial Sequence: Synthetic Light chain variable region nucleic acid sequence

SEQ ID NO: 2730 - protein, 109 aa, Artificial Sequence; identical to SEQ ID NO: 346
  Description of Artificial Sequence: Synthetic Light chain variable region amino acid sequence

SEQ ID NO: 2731 - protein, 14 aa, Artificial Sequence
  Description of Artificial Sequence: Synthetic Light chain variable region CDR L1 amino acid sequence
GSSTGAVTTSNYAN

SEQ ID NO: 2732 - DNA, 42 bp, Artificial Sequence; identical to SEQ ID NO: 204
  Description of Artificial Sequence: Synthetic Light chain variable region CDR L1 nucleic acid sequence

SEQ ID NO: 2733 - protein, 7 aa, Artificial Sequence
  Description of Artificial Sequence: Synthetic Light chain variable region CDR L2 amino acid sequence
GTDKRAP

SEQ ID NO: 2734 - DNA, 21 bp, Artificial Sequence
  Description of Artificial Sequence: Synthetic Light chain variable region CDR L2 nucleic acid sequence
ggcacagacaagcgcgctcct

SEQ ID NO: 2735 - protein, 9 aa, Artificial Sequence
  Description of Artificial Sequence: Synthetic Light chain variable region CDR L3 amino acid sequence
ALWYSNHWV

SEQ ID NO: 2736 - DNA, 27 bp, Artificial Sequence
  Description of Artificial Sequence: Synthetic Light chain variable region CDR L3 nucleic acid sequence
gcgctgtggtacagtaaccattgggtg

SEQ ID NO: 2737 - DNA, 375 bp, Artificial Sequence; identical to SEQ ID NO: 145
  Description of Artificial Sequence: Synthetic Heavy chain variable region nucleic acid sequence

SEQ ID NO: 2738 - protein, 125 aa, Artificial Sequence; identical to SEQ ID NO: 146
  Description of Artificial Sequence: Synthetic Heavy chain variable region amino acid sequence

SEQ ID NO: 2739 - protein, 9 aa, Artificial Sequence
  Description of Artificial Sequence: Synthetic Heavy chain variable region CDR H1 amino acid sequence
FTFDTYAMN

SEQ ID NO: 2740 - DNA, 27 bp, Artificial Sequence
  Description of Artificial Sequence: Synthetic Heavy chain variable region CDR H1 nucleic acid sequence
ttcacctttgacacatatgccatgaat

SEQ ID NO: 2741 - protein, 19 aa, Artificial Sequence
  Description of Artificial Sequence: Synthetic Heavy chain variable region CDR H2 amino acid sequence
RIRSKYNNYATYYADSVKD

SEQ ID NO: 2742 - DNA, 57 bp, Artificial Sequence; identical to SEQ ID NO: 6
  Description of Artificial Sequence: Synthetic Heavy chain variable region CDR H2 nucleic acid sequence

SEQ ID NO: 2743 - protein, 16 aa, Artificial Sequence
  Description of Artificial Sequence: Synthetic Heavy chain variable region CDR H3 amino acid sequence
VRHSNFGNSYVSWFAH

SEQ ID NO: 2744 - DNA, 48 bp, Artificial Sequence; identical to SEQ ID NO: 152
  Description of Artificial Sequence: Synthetic Heavy chain variable region CDR H3 nucleic acid sequence

SEQ ID NO: 2745 - DNA, 327 bp, Artificial Sequence; identical to SEQ ID NO: 2425
  Description of Artificial Sequence: Synthetic Light chain variable region nucleic acid sequence

SEQ ID NO: 2746 - protein, 109 aa, Artificial Sequence; identical to SEQ ID NO: 2426
  Description of Artificial Sequence: Synthetic Light chain variable region amino acid sequence

SEQ ID NO: 2747 - protein, 14 aa, Artificial Sequence
  Description of Artificial Sequence: Synthetic Light chain variable region CDR L1 amino acid sequence
GSSTGAVTTSNYAN

SEQ ID NO: 2748 - DNA, 42 bp, Artificial Sequence; identical to SEQ ID NO: 204
  Description of Artificial Sequence: Synthetic Light chain variable region CDR L1 nucleic acid sequence

SEQ ID NO: 2749 - protein, 7 aa, Artificial Sequence
  Description of Artificial Sequence: Synthetic Light chain variable region CDR L2 amino acid sequence
GTDKRAP

SEQ ID NO: 2750 - DNA, 21 bp, Artificial Sequence
  Description of Artificial Sequence: Synthetic Light chain variable region CDR L2 nucleic acid sequence
ggcacagacaagcgcgctcct

SEQ ID NO: 2751 - protein, 9 aa, Artificial Sequence
  Description of Artificial Sequence: Synthetic Light chain variable region CDR L3 amino acid sequence
VLWYSNHWV

SEQ ID NO: 2752 - DNA, 27 bp, Artificial Sequence
  Description of Artificial Sequence: Synthetic Light chain variable region CDR L3 nucleic acid sequence
gtgctgtggtacagtaaccattgggtg

SEQ ID NO: 2753 - DNA, 351 bp, Artificial Sequence
  Description of Artificial Sequence: Synthetic Heavy chain variable region nucleic acid sequence
caggtacagctgcagcagtcaggacctgagctggtgaagcctggggcttcagtgaggatatcctgcaaggcttctggctacaccttcataagctactatatacactgggtgaagcagaggcctggacagggacttgagtggattggatggatttatcctggaaatgttaatactaagtacaatgagaagttcaaggccaaggccacactgactgcagacaaatcctccagcacagcctacatgcagctcagcagtctgacctctgaggactctgcggtctatttctgtgcaagagatgataactactcctttgcttactggggccaaggcaaccacggtcaccgtctcctc

SEQ ID NO: 2754 - protein, 117 aa, Artificial Sequence
  Description of Artificial Sequence: Synthetic Heavy chain variable region amino acid sequence
QVQLQQSGPELVKPGASVRISCKASGYTFISYYIHWVKQRPGQGLEWIGWIYPGNVNTKYNEKFKAKATLTADKSSSTAYMQLSSLTSEDSAVYFCARDDNYSFAYWGQGNHGHRLL

SEQ ID NO: 2755 - protein, 9 aa, Artificial Sequence
  Description of Artificial Sequence: Synthetic Heavy chain variable region CDR H1 amino acid sequence
YTFISYYIH

SEQ ID NO: 2756 - DNA, 27 bp, Artificial Sequence
  Description of Artificial Sequence: Synthetic Heavy chain variable region CDR H1 nucleic acid sequence
tacaccttcataagctactatatacac

SEQ ID NO: 2757 - protein, 17 aa, Artificial Sequence
  Description of Artificial Sequence: Synthetic Heavy chain variable region CDR H2 amino acid sequence
WIYPGNVNTKYNEKFKA

SEQ ID NO: 2758 - DNA, 51 bp, Artificial Sequence
  Description of Artificial Sequence: Synthetic Heavy chain variable region CDR H2 nucleic acid sequence
tggatttatcctggaaatgttaatactaagtacaatgagaagttcaaggcc

SEQ ID NO: 2759 - protein, 10 aa, Artificial Sequence
  Description of Artificial Sequence: Synthetic Heavy chain variable region CDR H3 amino acid sequence
ARDDNYSFAY

SEQ ID NO: 2760 - DNA, 30 bp, Artificial Sequence
  Description of Artificial Sequence: Synthetic Heavy chain variable region CDR H3 nucleic acid sequence
gcaagagatgataactactcctttgcttac

SEQ ID NO: 2761 - DNA, 336 bp, Artificial Sequence
  Description of Artificial Sequence: Synthetic Light chain variable region nucleic acid sequence
gacatcgtgatgatccagtctccatcctccctggctgtgtcagcaggagagaaggtcactatgagctgcaaatccagtcagagtctgctcaacagtagaacccgaaagaactacttggcttggtaccagcagaaaccagggcagtctcctaaactgctgatctactgggcatccactagggaatctggggtccctgatcgcttcacaggcagtggatctgggacagatttcactctcaccatcagcagtgtgcaggctgaagacctggcagtttattactgcaagcaatcttataatcttcggacgttcggtggagggaccaagctggaaataaaa

SEQ ID NO: 2762 - protein, 112 aa, Artificial Sequence
  Description of Artificial Sequence: Synthetic Light chain variable region amino acid sequence
DIVMIQSPSSLAVSAGEKVTMSCKSSQSLLNSRTRKNYLAWYQQKPGQSPKLLIYWASTRESGVPDRFTGSGSGTDFTLTISSVQAEDLAVYYCKQSYNLRTFGGGTKLEIK

SEQ ID NO: 2763 - protein, 17 aa, Artificial Sequence
  Description of Artificial Sequence: Synthetic Light chain variable region CDR L1 amino acid sequence
KSSQSLLNSRTRKNYLA

SEQ ID NO: 2764 - DNA, 51 bp, Artificial Sequence
  Description of Artificial Sequence: Synthetic Light chain variable region CDR L1 nucleic acid sequence
aaatccagtcagagtctgctcaacagtagaacccgaaagaactacttggct

SEQ ID NO: 2765 - protein, 7 aa, Artificial Sequence
  Description of Artificial Sequence: Synthetic Light chain variable region CDR L2 amino acid sequence
WASTRES

SEQ ID NO: 2766 - DNA, 21 bp, Artificial Sequence
  Description of Artificial Sequence: Synthetic Light chain variable region CDR L2 nucleic acid sequence
tgggcatccactagggaatct

SEQ ID NO: 2767 - protein, 8 aa, Artificial Sequence
  Description of Artificial Sequence: Synthetic Light chain variable region CDR L3 amino acid sequence
KQSYNLRT

SEQ ID NO: 2768 - DNA, 24 bp, Artificial Sequence
  Description of Artificial Sequence: Synthetic Light chain variable region CDR L3 nucleic acid sequence
aagcaatcttataatcttcggacg

SEQ ID NO: 2769 - DNA, 351 bp, Artificial Sequence
  Description of Artificial Sequence: Synthetic Heavy chain variable region nucleic acid sequence
gaagtacagctgcagcagtctggacctgacctggtgaagcctggggcttcagtgaagatgtcctgcaaggcttctggctacgccttcacaagctactatatacactgggtgaagcagaggcctggacagggacttgagtggattggatggatttatcttggagatggtagtactaactacaatgagaagttcaagggcaagaccacactgactgcagacaaatcctccagcacagcctacatgttgctcagcagcctgacctctgaggactctgcgacctatttctgtgcaagggatgattcgtactactttgactactggggccaaggcaccacggtcaccgtctcctca

SEQ ID NO: 2770 - protein, 117 aa, Artificial Sequence
  Description of Artificial Sequence: Synthetic Heavy chain variable region amino acid sequence
EVQLQQSGPDLVKPGASVKMSCKASGYAFTSYYIHWVKQRPGQGLEWIGWIYLGDGSTNYNEKFKGKTTLTADKSSSTAYMLLSSLTSEDSATYFCARDDSYYFDYWGQGTTVTVSS

SEQ ID NO: 2771 - protein, 9 aa, Artificial Sequence
  Description of Artificial Sequence: Synthetic Heavy chain variable region CDR H1 amino acid sequence
YAFTSYYIH

SEQ ID NO: 2772 - DNA, 27 bp, Artificial Sequence
  Description of Artificial Sequence: Synthetic Heavy chain variable region CDR H1 nucleic acid sequence
tacgccttcacaagctactatatacac

SEQ ID NO: 2773 - protein, 17 aa, Artificial Sequence
  Description of Artificial Sequence: Synthetic Heavy chain variable region CDR H2 amino acid sequence
WIYLGDGSTNYNEKFKG

SEQ ID NO: 2774 - DNA, 51 bp, Artificial Sequence
  Description of Artificial Sequence: Synthetic Heavy chain variable region CDR H2 nucleic acid sequence
tggatttatcttggagatggtagtactaactacaatgagaagttcaagggc

SEQ ID NO: 2775 - protein, 10 aa, Artificial Sequence
  Description of Artificial Sequence: Synthetic Heavy chain variable region CDR H3 amino acid sequence
ARDDSYYFDY

SEQ ID NO: 2776 - DNA, 30 bp, Artificial Sequence
  Description of Artificial Sequence: Synthetic Heavy chain variable region CDR H3 nucleic acid sequence
gcaagggatgattcgtactactttgactac

SEQ ID NO: 2777 - DNA, 336 bp, Artificial Sequence
  Description of Artificial Sequence: Synthetic Light chain variable region nucleic acid sequence
gacattcagctcactcagtctccatcctccctggctgtgtcagcaggagagaaggtcactatgagctgcaaatccagtcagagtctgctcaacagtagaacccgaaagaactacttggcttggtaccaacagaaaccagggcagtctcctaaactgctgatctactgggcatccactagggaatctggggtccctgatcgcttcacaggcagtggatctgggacagatttcactctcaccatcagcagtgtgcaggctgaagacctggcagtttattactgcaagcaatcttatagtcttcggacgttcggtggagggaccaagctggaaatcaaa

SEQ ID NO: 2778 - protein, 112 aa, Artificial Sequence
  Description of Artificial Sequence: Synthetic Light chain variable region amino acid sequence
DIQLTQSPSSLAVSAGEKVTMSCKSSQSLLNSRTRKNYLAWYQQKPGQSPKLLIYWASTRESGVPDRFTGSGSGTDFTLTISSVQAEDLAVYYCKQSYSLRTFGGGTKLEIK

SEQ ID NO: 2779 - protein, 17 aa, Artificial Sequence
  Description of Artificial Sequence: Synthetic Light chain variable region CDR L1 amino acid sequence
KSSQSLLNSRTRKNYLA

SEQ ID NO: 2780 - DNA, 51 bp, Artificial Sequence; identical to SEQ ID NO: 2764
  Description of Artificial Sequence: Synthetic Light chain variable region CDR L1 nucleic acid sequence

SEQ ID NO: 2781 - protein, 7 aa, Artificial Sequence
  Description of Artificial Sequence: Synthetic Light chain variable region CDR L2 amino acid sequence
WASTRES

SEQ ID NO: 2782 - DNA, 21 bp, Artificial Sequence
  Description of Artificial Sequence: Synthetic Light chain variable region CDR L2 nucleic acid sequence
tgggcatccactagggaatct

SEQ ID NO: 2783 - protein, 8 aa, Artificial Sequence
  Description of Artificial Sequence: Synthetic Light chain variable region CDR L3 amino acid sequence
KQSYSLRT

SEQ ID NO: 2784 - DNA, 24 bp, Artificial Sequence
  Description of Artificial Sequence: Synthetic Light chain variable region CDR L3 nucleic acid sequence
aagcaatcttatagtcttcggacg

SEQ ID NO: 2785 - DNA, 351 bp, Artificial Sequence
  Description of Artificial Sequence: Synthetic Heavy chain variable region nucleic acid sequence
caggtgaagctggaggagtcaggacctgagctggtgaagcctggggcttcagtgaggatatcctgcaaggcttctggctacaccttcacacgctactatatacactgggtgaagcagaggcctggacagggacttgagtggattggatggatttatcctggaaatgttaatactaaatacaatgagaagttcaagggcaaggccacactgtctgcagacaaatcctccagcacagcctacatgcagctcagcagcctgacctctgaggactctgcggtctatttctgtgcaagagatggtgattactactttgactactggggccaaggcaccacggtcaccgtctcctca

SEQ ID NO: 2786 - protein, 117 aa, Artificial Sequence
  Description of Artificial Sequence: Synthetic Heavy chain variable region amino acid sequence
QVKLEESGPELVKPGASVRISCKASGYTFTRYYIHWVKQRPGQGLEWIGWIYPGNVNTKYNEKFKGKATLSADKSSSTAYMQLSSLTSEDSAVYFCARDGDYYFDYWGQGTTVTVSS

SEQ ID NO: 2787 - protein, 9 aa, Artificial Sequence
  Description of Artificial Sequence: Synthetic Heavy chain variable region CDR H1 amino acid sequence
YTFTRYYIH

SEQ ID NO: 2788 - DNA, 27 bp, Artificial Sequence
  Description of Artificial Sequence: Synthetic Heavy chain variable region CDR H1 nucleic acid sequence
tacaccttcacacgctactatatacac

SEQ ID NO: 2789 - protein, 17 aa, Artificial Sequence
  Description of Artificial Sequence: Synthetic Heavy chain variable region CDR H2 amino acid sequence
WIYPGNVNTKYNEKFKG

SEQ ID NO: 2790 - DNA, 51 bp, Artificial Sequence
  Description of Artificial Sequence: Synthetic Heavy chain variable region CDR H2 nucleic acid sequence
tggatttatcctggaaatgttaatactaaatacaatgagaagttcaagggc

SEQ ID NO: 2791 - protein, 10 aa, Artificial Sequence
  Description of Artificial Sequence: Synthetic Heavy chain variable region CDR H3 amino acid sequence
ARDGDYYFDY

SEQ ID NO: 2792 - DNA, 30 bp, Artificial Sequence
  Description of Artificial Sequence: Synthetic Heavy chain variable region CDR H3 nucleic acid sequence
gcaagagatggtgattactactttgactac

SEQ ID NO: 2793 - DNA, 336 bp, Artificial Sequence
  Description of Artificial Sequence: Synthetic Light chain variable region nucleic acid sequence
gacattcagctcactcagtctccatcctccctggctgtgtcagcaggagagaaggtcactatgagctgcaaatccagtcagagtctgctcaacagtagaacccgaaagaactacttggcttggtaccagcagaaaccagggcagtctcctaaactgctgatctactgggcatccactagggaatctggggtccctgatcgcttcacaggcagtggatctgggacagatttcactctcaccatcagcagtgtgcaggctgaagacctggcagtttattactgcaagcaatcttataatcttcggacgttcggtggaggcaccaagctggaaatcaaa

SEQ ID NO: 2794 - protein, 112 aa, Artificial Sequence
  Description of Artificial Sequence: Synthetic Light chain variable region amino acid sequence
DIQLTQSPSSLAVSAGEKVTMSCKSSQSLLNSRTRKNYLAWYQQKPGQSPKLLIYWASTRESGVPDRFTGSGSGTDFTLTISSVQAEDLAVYYCKQSYNLRTFGGGTKLEIK

SEQ ID NO: 2795 - protein, 17 aa, Artificial Sequence
  Description of Artificial Sequence: Synthetic Light chain variable region CDR L1 amino acid sequence
KSSQSLLNSRTRKNYLA

SEQ ID NO: 2796 - DNA, 51 bp, Artificial Sequence; identical to SEQ ID NO: 2764
  Description of Artificial Sequence: Synthetic Light chain variable region CDR L1 nucleic acid sequence

SEQ ID NO: 2797 - protein, 7 aa, Artificial Sequence
  Description of Artificial Sequence: Synthetic Light chain variable region CDR L2 amino acid sequence
WASTRES

SEQ ID NO: 2798 - DNA, 21 bp, Artificial Sequence
  Description of Artificial Sequence: Synthetic Light chain variable region CDR L2 nucleic acid sequence
tgggcatccactagggaatct

SEQ ID NO: 2799 - protein, 8 aa, Artificial Sequence
  Description of Artificial Sequence: Synthetic Light chain variable region CDR L3 amino acid sequence
KQSYNLRT

SEQ ID NO: 2800 - DNA, 24 bp, Artificial Sequence
  Description of Artificial Sequence: Synthetic Light chain variable region CDR L3 nucleic acid sequence
aagcaatcttataatcttcggacg

SEQ ID NO: 2801 - DNA, 351 bp, Artificial Sequence
  Description of Artificial Sequence: Synthetic Heavy chain variable region nucleic acid sequence
gaggtgcagctgcaggagtctggacctgagctggtgaaacctggggcttcagtgaggatatcctgcaaggcttctggctacaccttcacaagctactatatacactgggtgaagcagaggcctggacagggacttgagtggattggatggatttatcctggaaatgttaatactaagtacaatgagaagttcaagggcaaggccacactgactgcagacaaatcctccagcacagcctacatgcagctcagcagcctgacctctgaggactctgcggtctatttctgtgcaagagatggtgattactactttgactactggggccaaggcaccacggtcaccgtctcctca

SEQ ID NO: 2802 - protein, 117 aa, Artificial Sequence
  Description of Artificial Sequence: Synthetic Heavy chain variable region amino acid sequence
EVQLQESGPELVKPGASVRISCKASGYTFTSYYIHWVKQRPGQGLEWIGWIYPGNVNTKYNEKFKGKATLTADKSSSTAYMQLSSLTSEDSAVYFCARDGDYYFDYWGQGTTVTVSS

SEQ ID NO: 2803 - protein, 9 aa, Artificial Sequence
  Description of Artificial Sequence: Synthetic Heavy chain variable region CDR H1 amino acid sequence
YTFTSYYIH

SEQ ID NO: 2804 - DNA, 27 bp, Artificial Sequence
  Description of Artificial Sequence: Synthetic Heavy chain variable region CDR H1 nucleic acid sequence
tacaccttcacaagctactatatacac

SEQ ID NO: 2805 - protein, 17 aa, Artificial Sequence
  Description of Artificial Sequence: Synthetic Heavy chain variable region CDR H2 amino acid sequence
WIYPGNVNTKYNEKFKG

SEQ ID NO: 2806 - DNA, 51 bp, Artificial Sequence
  Description of Artificial Sequence: Synthetic Heavy chain variable region CDR H2 nucleic acid sequence
tggatttatcctggaaatgttaatactaagtacaatgagaagttcaagggc

SEQ ID NO: 2807 - protein, 10 aa, Artificial Sequence
  Description of Artificial Sequence: Synthetic Heavy chain variable region CDR H3 amino acid sequence
ARDGDYYFDY

SEQ ID NO: 2808 - DNA, 30 bp, Artificial Sequence; identical to SEQ ID NO: 2792
  Description of Artificial Sequence: Synthetic Heavy chain variable region CDR H3 nucleic acid sequence

SEQ ID NO: 2809 - DNA, 336 bp, Artificial Sequence
  Description of Artificial Sequence: Synthetic Light chain variable region nucleic acid sequence
gacattcagctgacccagtctccatcctccctggctgtgtcagcaggagagaaggtcactatgagctgcaaatccagtcagagtctgctcaacagtagaacccgaaagaactacttggcttggtaccagcagaaaccagggcagtctcctaaactgctgatctactgggcatccactagggaatctggggtccctgatcgcttcacaggcagtggatctgggacagatttcactctcaccatcagcagtgtgcaggctgaagacctggcagtttattactgcaagcaatcttataatcttcggacgttcggtggagggaccaagctggagctgaaa

SEQ ID NO: 2810 - protein, 112 aa, Artificial Sequence
  Description of Artificial Sequence: Synthetic Light chain variable region amino acid sequence
DIQLTQSPSSLAVSAGEKVTMSCKSSQSLLNSRTRKNYLAWYQQKPGQSPKLLIYWASTRESGVPDRFTGSGSGTDFTLTISSVQAEDLAVYYCKQSYNLRTFGGGTKLELK

SEQ ID NO: 2811 - protein, 17 aa, Artificial Sequence
  Description of Artificial Sequence: Synthetic Light chain variable region CDR L1 amino acid sequence
KSSQSLLNSRTRKNYLA

SEQ ID NO: 2812 - DNA, 51 bp, Artificial Sequence; identical to SEQ ID NO: 2764
  Description of Artificial Sequence: Synthetic Light chain variable region CDR L1 nucleic acid sequence

SEQ ID NO: 2813 - protein, 7 aa, Artificial Sequence
  Description of Artificial Sequence: Synthetic Light chain variable region CDR L2 amino acid sequence
WASTRES

SEQ ID NO: 2814 - DNA, 21 bp, Artificial Sequence
  Description of Artificial Sequence: Synthetic Light chain variable region CDR L2 nucleic acid sequence
tgggcatccactagggaatct

SEQ ID NO: 2815 - protein, 8 aa, Artificial Sequence
  Description of Artificial Sequence: Synthetic Light chain variable region CDR L3 amino acid sequence
KQSYNLRT

SEQ ID NO: 2816 - DNA, 24 bp, Artificial Sequence
  Description of Artificial Sequence: Synthetic Light chain variable region CDR L3 nucleic acid sequence
aagcaatcttataatcttcggacg

SEQ ID NO: 2817 - DNA, 351 bp, Artificial Sequence
  Description of Artificial Sequence: Synthetic Heavy chain variable region nucleic acid sequence
gaggtcaagctggaggagtcaggacctgagctggcgaagcctggggcttcagtgaggatatcctgcaaggcttctggctacaccttcacaagctactatatacactgggtgaagcagaggcctggacagggacttgagtggattggatggatttatcctggaaatgttaatactaagtacaatgagaagttcaagggcaaggccacactgactgcagacacatcctccagcacagcctacatgcagctcagcagcctgacctctgaggactctgcggtctatttctgtgcaagagatggtaactacttcttcgatgtctggggccaaggcaccacggtcaccgtctcctca

SEQ ID NO: 2818 - protein, 117 aa, Artificial Sequence
  Description of Artificial Sequence: Synthetic Heavy chain variable region amino acid sequence
EVKLEESGPELAKPGASVRISCKASGYTFTSYYIHWVKQRPGQGLEWIGWIYPGNVNTKYNEKFKGKATLTADTSSSTAYMQLSSLTSEDSAVYFCARDGNYFFDVWGQGTTVTVSS

SEQ ID NO: 2819 - protein, 9 aa, Artificial Sequence
  Description of Artificial Sequence: Synthetic Heavy chain variable region CDR H1 amino acid sequence
YTFTSYYIH

SEQ ID NO: 2820 - DNA, 27 bp, Artificial Sequence
  Description of Artificial Sequence: Synthetic Heavy chain variable region CDR H1 nucleic acid sequence
tacaccttcacaagctactatatacac

SEQ ID NO: 2821 - protein, 17 aa, Artificial Sequence
  Description of Artificial Sequence: Synthetic Heavy chain variable region CDR H2 amino acid sequence
WIYPGNVNTKYNEKFKG

SEQ ID NO: 2822 - DNA, 51 bp, Artificial Sequence; identical to SEQ ID NO: 2806
  Description of Artificial Sequence: Synthetic Heavy chain variable region CDR H2 nucleic acid sequence

SEQ ID NO: 2823 - protein, 10 aa, Artificial Sequence
  Description of Artificial Sequence: Synthetic Heavy chain variable region CDR H3 amino acid sequence
ARDGNYFFDV

SEQ ID NO: 2824 - DNA, 30 bp, Artificial Sequence
  Description of Artificial Sequence: Synthetic Heavy chain variable region CDR H3 nucleic acid sequence
gcaagagatggtaactacttcttcgatgtc

SEQ ID NO: 2825 - DNA, 336 bp, Artificial Sequence
  Description of Artificial Sequence: Synthetic Light chain variable region nucleic acid sequence
gacatccagctgactcagtctccatcctccctggctgtgtcagcaggagagaaggtcactatgagctgcaaatccagtcagagtctgctcaacagtagaacccgaaagaactacctggcttggtaccagcagaaaccagggcagtctcctaaactgctgatctactgggcatccactagggaatctggggtccctgatcgcttcacaggcagtggatctgggacagatttcactctcaccatcagcagtgtgcaggctgaagacctggcagtttattactgcaagcaatcttataaccttcggacgttcggtggagggaccaagctggagctgaaa

SEQ ID NO: 2826 - protein, 112 aa, Artificial Sequence; identical to SEQ ID NO: 2810
  Description of Artificial Sequence: Synthetic Light chain variable region amino acid sequence

SEQ ID NO: 2827 - protein, 17 aa, Artificial Sequence
  Description of Artificial Sequence: Synthetic Light chain variable region CDR L1 amino acid sequence
KSSQSLLNSRTRKNYLA

SEQ ID NO: 2828 - DNA, 51 bp, Artificial Sequence
  Description of Artificial Sequence: Synthetic Light chain variable region CDR L1 nucleic acid sequence
aaatccagtcagagtctgctcaacagtagaacccgaaagaactacctggct

SEQ ID NO: 2829 - protein, 7 aa, Artificial Sequence
  Description of Artificial Sequence: Synthetic Light chain variable region CDR L2 amino acid sequence
WASTRES

SEQ ID NO: 2830 - DNA, 21 bp, Artificial Sequence
  Description of Artificial Sequence: Synthetic Light chain variable region CDR L2 nucleic acid sequence
tgggcatccactagggaatct

SEQ ID NO: 2831 - protein, 8 aa, Artificial Sequence
  Description of Artificial Sequence: Synthetic Light chain variable region CDR L3 amino acid sequence
KQSYNLRT

SEQ ID NO: 2832 - DNA, 24 bp, Artificial Sequence
  Description of Artificial Sequence: Synthetic Light chain variable region CDR L3 nucleic acid sequence
aagcaatcttataaccttcggacg

SEQ ID NO: 2833 - DNA, 351 bp, Artificial Sequence
  Description of Artificial Sequence: Synthetic Heavy chain variable region nucleic acid sequence
gaggttcagctggaggagtctggacctgaactggtgaagcctggggcttcagtgaggatatcctgcaaggcttctggctacaccttcacaagctactatatacactgggtgaagcagaggcctggacagggacttgagtggattggatggatttatcctggaaatgttaatactaagtacaatgagaagttcaagggcaaggccacactgactgcagacaaatcctccagcacagcctacatgcagctcagcagcctgacctctgaggactctgcaatctatttctgtgcaagagatggtaactacttcttcgatgtctggggccaaggcaccacggtcaccgtctcctca

SEQ ID NO: 2834 - protein, 117 aa, Artificial Sequence
  Description of Artificial Sequence: Synthetic Heavy chain variable region amino acid sequence
EVQLEESGPELVKPGASVRISCKASGYTFTSYYIHWVKQRPGQGLEWIGWIYPGNVNTKYNEKFKGKATLTADKSSSTAYMQLSSLTSEDSAIYFCARDGNYFFDVWGQGTTVTVSS

SEQ ID NO: 2835 - protein, 9 aa, Artificial Sequence
  Description of Artificial Sequence: Synthetic Heavy chain variable region CDR H1 amino acid sequence
YTFTSYYIH

SEQ ID NO: 2836 - DNA, 27 bp, Artificial Sequence
  Description of Artificial Sequence: Synthetic Heavy chain variable region CDR H1 nucleic acid sequence
tacaccttcacaagctactatatacac

SEQ ID NO: 2837 - protein, 17 aa, Artificial Sequence
  Description of Artificial Sequence: Synthetic Heavy chain variable region CDR H2 amino acid sequence
WIYPGNVNTKYNEKFKG

SEQ ID NO: 2838 - DNA, 51 bp, Artificial Sequence; identical to SEQ ID NO: 2806
  Description of Artificial Sequence: Synthetic Heavy chain variable region CDR H2 nucleic acid sequence

SEQ ID NO: 2839 - protein, 10 aa, Artificial Sequence
  Description of Artificial Sequence: Synthetic Heavy chain variable region CDR H3 amino acid sequence
ARDGNYFFDV

SEQ ID NO: 2840 - DNA, 30 bp, Artificial Sequence; identical to SEQ ID NO: 2824
  Description of Artificial Sequence: Synthetic Heavy chain variable region CDR H3 nucleic acid sequence

SEQ ID NO: 2841 - DNA, 336 bp, Artificial Sequence
  Description of Artificial Sequence: Synthetic Light chain variable region nucleic acid sequence
gatatcgagctgattcagtctccatcctccctggctgtgtcagcaggagagaaggtcactatgagctgcaaatccagtcagaatctgctcaacagtagaacccgaaagaactacttggcttggtaccggcagaaaccagggcagtctcctaaactgctgatctactgggcatccactagggaatctggggtccctgatcgcttcacaggcagtggatctgggacagatttcactctcaccatcagcagtgtgcaggctgaagacctggcagtatattactgcaagcaatcttataatcttcggacgttcggtggagggaccaagctggagctgaaa

SEQ ID NO: 2842 - protein, 112 aa, Artificial Sequence
  Description of Artificial Sequence: Synthetic Light chain variable region amino acid sequence
DIELIQSPSSLAVSAGEKVTMSCKSSQNLLNSRTRKNYLAWYRQKPGQSPKLLIYWASTRESGVPDRFTGSGSGTDFTLTISSVQAEDLAVYYCKQSYNLRTFGGGTKLELK

SEQ ID NO: 2843 - protein, 17 aa, Artificial Sequence
  Description of Artificial Sequence: Synthetic Light chain variable region CDR L1 amino acid sequence
KSSQNLLNSRTRKNYLA

SEQ ID NO: 2844 - DNA, 51 bp, Artificial Sequence
  Description of Artificial Sequence: Synthetic Light chain variable region CDR L1 nucleic acid sequence
aaatccagtcagaatctgctcaacagtagaacccgaaagaactacttggct

SEQ ID NO: 2845 - protein, 7 aa, Artificial Sequence
  Description of Artificial Sequence: Synthetic Light chain variable region CDR L2 amino acid sequence
WASTRES

SEQ ID NO: 2846 - DNA, 21 bp, Artificial Sequence
  Description of Artificial Sequence: Synthetic Light chain variable region CDR L2 nucleic acid sequence
tgggcatccactagggaatct

SEQ ID NO: 2847 - protein, 8 aa, Artificial Sequence
  Description of Artificial Sequence: Synthetic Light chain variable region CDR L3 amino acid sequence
KQSYNLRT

SEQ ID NO: 2848 - DNA, 24 bp, Artificial Sequence
  Description of Artificial Sequence: Synthetic Light chain variable region CDR L3 nucleic acid sequence
aagcaatcttataatcttcggacg

SEQ ID NO: 2849 - DNA, 354 bp, Artificial Sequence
  Description of Artificial Sequence: Synthetic Heavy chain variable region nucleic acid sequence
caggtaaagctgcagcagtctggacctgagctggtgaagcctggggcttcagtgaggatatcctgcaaggcttctggcaacaccttcacaagctcctatatacactgggtgaagcagaggcctggacagggacttgagtggattggatggatttatcctggaaatgttaatactaagtacaatgagaagttcaagggcaaggccacactgactgcagacaaatcctccagcacagtctacatgcagctcagcagcctgacctctgaggactctgcggtctatttctgtgcaagagacggtagtagctactactttgactactggggccaaggcaccacggtcaccgtctcctca

SEQ ID NO: 2850 - protein, 118 aa, Artificial Sequence
  Description of Artificial Sequence: Synthetic Heavy chain variable region amino acid sequence
QVKLQQSGPELVKPGASVRISCKASGNTFTSSYIHWVKQRPGQGLEWIGWIYPGNVNTKYNEKFKGKATLTADKSSSTVYMQLSSLTSEDSAVYFCARDGSSYYFDYWGQGTTVTVSS

SEQ ID NO: 2851 - protein, 9 aa, Artificial Sequence
  Description of Artificial Sequence: Synthetic Heavy chain variable region CDR H1 amino acid sequence
NTFTSSYIH

SEQ ID NO: 2852 - DNA, 27 bp, Artificial Sequence
  Description of Artificial Sequence: Synthetic Heavy chain variable region CDR H1 nucleic acid sequence
aacaccttcacaagctcctatatacac

SEQ ID NO: 2853 - protein, 17 aa, Artificial Sequence
  Description of Artificial Sequence: Synthetic Heavy chain variable region CDR H2 amino acid sequence
WIYPGNVNTKYNEKFKG

SEQ ID NO: 2854 - DNA, 51 bp, Artificial Sequence; identical to SEQ ID NO: 2806
  Description of Artificial Sequence: Synthetic Heavy chain variable region CDR H2 nucleic acid sequence

SEQ ID NO: 2855 - protein, 11 aa, Artificial Sequence
  Description of Artificial Sequence: Synthetic Heavy chain variable region CDR H3 amino acid sequence
ARDGSSYYFDY

SEQ ID NO: 2856 - DNA, 33 bp, Artificial Sequence
  Description of Artificial Sequence: Synthetic Heavy chain variable region CDR H3 nucleic acid sequence
gcaagagacggtagtagctactactttgactac

SEQ ID NO: 2857 - DNA, 336 bp, Artificial Sequence
  Description of Artificial Sequence: Synthetic Light chain variable region nucleic acid sequence
gacatccagctgactcagtctccatcctccctggctgtgtcagcaggagagaaggtcactatgagctgcaaatccagtcagagtctgctcaacagtagaacccgaaagaactacttggcttggtaccagcagaaaccagggcagtctcctaaactgctgatctactgggcatccactagggaatctggggtccctgatcgcttcacaggcagtggatctgggacagatttcactctcaccatcagcagtgtgcaggctgaagacctggcagtttattactgcaagcaatcttataatcttcggacgttcggtggagggaccaagctggagctgaaa

SEQ ID NO: 2858 - protein, 112 aa, Artificial Sequence; identical to SEQ ID NO: 2810
  Description of Artificial Sequence: Synthetic Light chain variable region amino acid sequence

SEQ ID NO: 2859 - protein, 17 aa, Artificial Sequence
  Description of Artificial Sequence: Synthetic Light chain variable region CDR L1 amino acid sequence
KSSQSLLNSRTRKNYLA

SEQ ID NO: 2860 - DNA, 51 bp, Artificial Sequence; identical to SEQ ID NO: 2764
  Description of Artificial Sequence: Synthetic Light chain variable region CDR L1 nucleic acid sequence

SEQ ID NO: 2861 - protein, 7 aa, Artificial Sequence
  Description of Artificial Sequence: Synthetic Light chain variable region CDR L2 amino acid sequence
WASTRES

SEQ ID NO: 2862 - DNA, 21 bp, Artificial Sequence
  Description of Artificial Sequence: Synthetic Light chain variable region CDR L2 nucleic acid sequence
tgggcatccactagggaatct

SEQ ID NO: 2863 - protein, 8 aa, Artificial Sequence
  Description of Artificial Sequence: Synthetic Light chain variable region CDR L3 amino acid sequence
KQSYNLRT

SEQ ID NO: 2864 - DNA, 24 bp, Artificial Sequence
  Description of Artificial Sequence: Synthetic Light chain variable region CDR L3 nucleic acid sequence
aagcaatcttataatcttcggacg

SEQ ID NO: 2865 - DNA, 351 bp, Artificial Sequence
  Description of Artificial Sequence: Synthetic Heavy chain variable region nucleic acid sequence
gaagtgcagctggagcagtcaggacctgagctggtgaagcctggggcttcagtgaagatgtcctgcaaggcttctggctacaccttcacaagctactatatacactgggtgaagcagaggcctggacagggacttgagtggattggatggatttatcctggagatggtagtactaagtacaatgagaagttcaagggcaagaccacactgactgcagacaaatcctccagcacagcctacatgttgctcagcagcctgacctctgaggactctgcgatctatttctgtgcaagggatggttcgtactactttgactactggggccaaggcaccacggtcaccgtctcctca

SEQ ID NO: 2866 - protein, 117 aa, Artificial Sequence
  Description of Artificial Sequence: Synthetic Heavy chain variable region amino acid sequence
EVQLEQSGPELVKPGASVKMSCKASGYTFTSYYIHWVKQRPGQGLEWIGWIYPGDGSTKYNEKFKGKTTLTADKSSSTAYMLLSSLTSEDSAIYFCARDGSYYFDYWGQGTTVTVSS

SEQ ID NO: 2867 - protein, 9 aa, Artificial Sequence
  Description of Artificial Sequence: Synthetic Heavy chain variable region CDR H1 amino acid sequence
YTFTSYYIH

SEQ ID NO: 2868 - DNA, 27 bp, Artificial Sequence
  Description of Artificial Sequence: Synthetic Heavy chain variable region CDR H1 nucleic acid sequence
tacaccttcacaagctactatatacac

SEQ ID NO: 2869 - protein, 17 aa, Artificial Sequence
  Description of Artificial Sequence: Synthetic Heavy chain variable region CDR H2 amino acid sequence
WIYPGDGSTKYNEKFKG

SEQ ID NO: 2870 - DNA, 51 bp, Artificial Sequence
  Description of Artificial Sequence: Synthetic Heavy chain variable region CDR H2 nucleic acid sequence
tggatttatcctggagatggtagtactaagtacaatgagaagttcaagggc

SEQ ID NO: 2871 - protein, 10 aa, Artificial Sequence
  Description of Artificial Sequence: Synthetic Heavy chain variable region CDR H3 amino acid sequence
ARDGSYYFDY

SEQ ID NO: 2872 - DNA, 30 bp, Artificial Sequence
  Description of Artificial Sequence: Synthetic Heavy chain variable region CDR H3 nucleic acid sequence
gcaagggatggttcgtactactttgactac

SEQ ID NO: 2873 - DNA, 336 bp, Artificial Sequence
  Description of Artificial Sequence: Synthetic Light chain variable region nucleic acid sequence
gacattcagctcacccagtctccatcctccctggctgtgtcagcaggagagaaggtcactatgagctgcaaatccagtcagagtctgctcaacagtagaacccgaaagaactacttggcttggtaccaacagaaaccagggcagtctcctaaactgctgatctactgggcatccactagggaatctggggtccctgatcgcttcacaggcagtggatctgggacagatttcactctcaccatcagcagtgtgcaggctgaagacctggcagtttattactgcaagcaatcttatagtcttcggacgttcggtggagggaccaagctggagctgaaa

SEQ ID NO: 2874 - protein, 112 aa, Artificial Sequence
  Description of Artificial Sequence: Synthetic Light chain variable region amino acid sequence
DIQLTQSPSSLAVSAGEKVTMSCKSSQSLLNSRTRKNYLAWYQQKPGQSPKLLIYWASTRESGVPDRFTGSGSGTDFTLTISSVQAEDLAVYYCKQSYSLRTFGGGTKLELK

SEQ ID NO: 2875 - protein, 17 aa, Artificial Sequence
  Description of Artificial Sequence: Synthetic Light chain variable region CDR L1 amino acid sequence
KSSQSLLNSRTRKNYLA

SEQ ID NO: 2876 - DNA, 51 bp, Artificial Sequence; identical to SEQ ID NO: 2764
  Description of Artificial Sequence: Synthetic Light chain variable region CDR L1 nucleic acid sequence

SEQ ID NO: 2877 - protein, 7 aa, Artificial Sequence
  Description of Artificial Sequence: Synthetic Light chain variable region CDR L2 amino acid sequence
WASTRES

SEQ ID NO: 2878 - DNA, 21 bp, Artificial Sequence
  Description of Artificial Sequence: Synthetic Light chain variable region CDR L2 nucleic acid sequence
tgggcatccactagggaatct

SEQ ID NO: 2879 - protein, 8 aa, Artificial Sequence
  Description of Artificial Sequence: Synthetic Light chain variable region CDR L3 amino acid sequence
KQSYSLRT

SEQ ID NO: 2880 - DNA, 24 bp, Artificial Sequence
  Description of Artificial Sequence: Synthetic Light chain variable region CDR L3 nucleic acid sequence
aagcaatcttatagtcttcggacg

SEQ ID NO: 2881 - DNA, 351 bp, Artificial Sequence
  Description of Artificial Sequence: Synthetic Heavy chain variable region nucleic acid sequence
gaggtgaagctggaggagtctggacctgagctggtgaagcctggggcttcagtgaagatgtcctgcaaggcttctggctacaccttcacaagctactatatacactgggtgaagcagaggcctggacagggacttgagtggattggatggatttatcctggagatggtagtactaagtacaatgagaagttcaagggcaagaccacactgactgcagacaaatcctccagcacagcctacatgttgctcagcagcctgacctctgaggactctgcgatctatttctgtgcaagggatggttcgtactactttgactactggggccaaggcaccacggtcaccgtctcctca

SEQ ID NO: 2882 - protein, 117 aa, Artificial Sequence
  Description of Artificial Sequence: Synthetic Heavy chain variable region amino acid sequence
EVKLEESGPELVKPGASVKMSCKASGYTFTSYYIHWVKQRPGQGLEWIGWIYPGDGSTKYNEKFKGKTTLTADKSSSTAYMLLSSLTSEDSAIYFCARDGSYYFDYWGQGTTVTVSS

SEQ ID NO: 2883 - protein, 9 aa, Artificial Sequence
  Description of Artificial Sequence: Synthetic Heavy chain variable region CDR H1 amino acid sequence
YTFTSYYIH

SEQ ID NO: 2884 - DNA, 27 bp, Artificial Sequence
  Description of Artificial Sequence: Synthetic Heavy chain variable region CDR H1 nucleic acid sequence
tacaccttcacaagctactatatacac

SEQ ID NO: 2885 - protein, 17 aa, Artificial Sequence
  Description of Artificial Sequence: Synthetic Heavy chain variable region CDR H2 amino acid sequence
WIYPGDGSTKYNEKFKG

SEQ ID NO: 2886 - DNA, 51 bp, Artificial Sequence; identical to SEQ ID NO: 2870
  Description of Artificial Sequence: Synthetic Heavy chain variable region CDR H2 nucleic acid sequence

SEQ ID NO: 2887 - protein, 10 aa, Artificial Sequence
  Description of Artificial Sequence: Synthetic Heavy chain variable region CDR H3 amino acid sequence
ARDGSYYFDY

SEQ ID NO: 2888 - DNA, 30 bp, Artificial Sequence; identical to SEQ ID NO: 2872
  Description of Artificial Sequence: Synthetic Heavy chain variable region CDR H3 nucleic acid sequence

SEQ ID NO: 2889 - DNA, 336 bp, Artificial Sequence
  Description of Artificial Sequence: Synthetic Light chain variable region nucleic acid sequence
gacatccagctgacccagtctccatcctccctggctgtgtcagcaggagagaaggtcactatgagctgcaaatccagtcagagtctgctcaacagtagaacccgaaagaactacttggcttggtaccaacagaaaccagggcagtctcctaaactgctgatctactgggcatccactagggaatctggggtccctgatcgcttcacaggcagtggatctgggacagatttcactctcaccatcagcagtgtgcaggctgaagacctggcagtttattactgcaagcaatcttatagtcttcggacgttcggtggagggaccaagctggagctgaaa

SEQ ID NO: 2890 - protein, 112 aa, Artificial Sequence; identical to SEQ ID NO: 2874
  Description of Artificial Sequence: Synthetic Light chain variable region amino acid sequence

SEQ ID NO: 2891 - protein, 17 aa, Artificial Sequence
  Description of Artificial Sequence: Synthetic Light chain variable region CDR L1 amino acid sequence
KSSQSLLNSRTRKNYLA

SEQ ID NO: 2892 - DNA, 51 bp, Artificial Sequence; identical to SEQ ID NO: 2764
  Description of Artificial Sequence: Synthetic Light chain variable region CDR L1 nucleic acid sequence

SEQ ID NO: 2893 - protein, 7 aa, Artificial Sequence
  Description of Artificial Sequence: Synthetic Light chain variable region CDR L2 amino acid sequence
WASTRES

SEQ ID NO: 2894 - DNA, 21 bp, Artificial Sequence
  Description of Artificial Sequence: Synthetic Light chain variable region CDR L2 nucleic acid sequence
tgggcatccactagggaatct

SEQ ID NO: 2895 - protein, 8 aa, Artificial Sequence
  Description of Artificial Sequence: Synthetic Light chain variable region CDR L3 amino acid sequence
KQSYSLRT

SEQ ID NO: 2896 - DNA, 24 bp, Artificial Sequence
  Description of Artificial Sequence: Synthetic Light chain variable region CDR L3 nucleic acid sequence
aagcaatcttatagtcttcggacg

SEQ ID NO: 2897 - DNA, 351 bp, Artificial Sequence
  Description of Artificial Sequence: Synthetic Heavy chain variable region nucleic acid sequence
gaagtcaagctgcaggagtctggacctgagctggtgaagcctggggcttcagtgaagatgtcctgcaaggcttctggctacaccttcacaagctactatatacactgggtgaagcagaggcctggacagggacttgagtggattggatggatttatcctggagatggtagtactaagtacaatgagaagttcaagggcaagaccacactgactgcagacaaatcctccagcacagcctacatgttgctcagcagcctgacctctgaggactctgcgatctatttctgtgcaagggactacgggtactactttgactactggggccaaggcaccacggtcaccgtctcctca

SEQ ID NO: 2898 - protein, 117 aa, Artificial Sequence
  Description of Artificial Sequence: Synthetic Heavy chain variable region amino acid sequence
EVKLQESGPELVKPGASVKMSCKASGYTFTSYYIHWVKQRPGQGLEWIGWIYPGDGSTKYNEKFKGKTTLTADKSSSTAYMLLSSLTSEDSAIYFCARDYGYYFDYWGQGTTVTVSS

SEQ ID NO: 2899 - protein, 9 aa, Artificial Sequence
  Description of Artificial Sequence: Synthetic Heavy chain variable region CDR H1 amino acid sequence
YTFTSYYIH

SEQ ID NO: 2900 - DNA, 27 bp, Artificial Sequence
  Description of Artificial Sequence: Synthetic Heavy chain variable region CDR H1 nucleic acid sequence
tacaccttcacaagctactatatacac

SEQ ID NO: 2901 - protein, 17 aa, Artificial Sequence
  Description of Artificial Sequence: Synthetic Heavy chain variable region CDR H2 amino acid sequence
WIYPGDGSTKYNEKFKG

SEQ ID NO: 2902 - DNA, 51 bp, Artificial Sequence; identical to SEQ ID NO: 2870
  Description of Artificial Sequence: Synthetic Heavy chain variable region CDR H2 nucleic acid sequence

SEQ ID NO: 2903 - protein, 10 aa, Artificial Sequence
  Description of Artificial Sequence: Synthetic Heavy chain variable region CDR H3 amino acid sequence
ARDYGYYFDY

SEQ ID NO: 2904 - DNA, 30 bp, Artificial Sequence
  Description of Artificial Sequence: Synthetic Heavy chain variable region CDR H3 nucleic acid sequence
gcaagggactacgggtactactttgactac

SEQ ID NO: 2905 - DNA, 336 bp, Artificial Sequence; identical to SEQ ID NO: 2809
  Description of Artificial Sequence: Synthetic Light chain variable region nucleic acid sequence

SEQ ID NO: 2906 - protein, 112 aa, Artificial Sequence; identical to SEQ ID NO: 2810
  Description of Artificial Sequence: Synthetic Light chain variable region amino acid sequence

SEQ ID NO: 2907 - protein, 17 aa, Artificial Sequence
  Description of Artificial Sequence: Synthetic Light chain variable region CDR L1 amino acid sequence
KSSQSLLNSRTRKNYLA

SEQ ID NO: 2908 - DNA, 51 bp, Artificial Sequence; identical to SEQ ID NO: 2764
  Description of Artificial Sequence: Synthetic Light chain variable region CDR L1 nucleic acid sequence

SEQ ID NO: 2909 - protein, 7 aa, Artificial Sequence
  Description of Artificial Sequence: Synthetic Light chain variable region CDR L2 amino acid sequence
WASTRES

SEQ ID NO: 2910 - DNA, 21 bp, Artificial Sequence
  Description of Artificial Sequence: Synthetic Light chain variable region CDR L2 nucleic acid sequence
tgggcatccactagggaatct

SEQ ID NO: 2911 - protein, 8 aa, Artificial Sequence
  Description of Artificial Sequence: Synthetic Light chain variable region CDR L3 amino acid sequence
KQSYNLRT

SEQ ID NO: 2912 - DNA, 24 bp, Artificial Sequence
  Description of Artificial Sequence: Synthetic Light chain variable region CDR L3 nucleic acid sequence
aagcaatcttataatcttcggacg

SEQ ID NO: 2913 - DNA, 351 bp, Artificial Sequence
  Description of Artificial Sequence: Synthetic Heavy chain variable region nucleic acid sequence
gaggttaagctggaggagtcaggacctgagctggtgaagcctggggcttcagtgaggatatcctgcaaggcttctggctacaccttcacaagctactatatacactgggtgaagcagaggcctggacagggacttgagtggattggatggatttatcctggaaatgttaatactaagtacaatgagaagttcaagggcaaggccacactgactgcagacaaatcctccagcacagtttatatgcagctcagcagcctgacctctgaggactctgcggtctatttctgtgcaagagactatggttactactttgactattggggccaaggcaccacggtcaccgtctcctca

SEQ ID NO: 2914 - protein, 117 aa, Artificial Sequence
  Description of Artificial Sequence: Synthetic Heavy chain variable region amino acid sequence
EVKLEESGPELVKPGASVRISCKASGYTFTSYYIHWVKQRPGQGLEWIGWIYPGNVNTKYNEKFKGKATLTADKSSSTVYMQLSSLTSEDSAVYFCARDYGYYFDYWGQGTTVTVSS

SEQ ID NO: 2915 - protein, 9 aa, Artificial Sequence
  Description of Artificial Sequence: Synthetic Heavy chain variable region CDR H1 amino acid sequence
YTFTSYYIH

SEQ ID NO: 2916 - DNA, 27 bp, Artificial Sequence
  Description of Artificial Sequence: Synthetic Heavy chain variable region CDR H1 nucleic acid sequence
tacaccttcacaagctactatatacac

SEQ ID NO: 2917 - protein, 17 aa, Artificial Sequence
  Description of Artificial Sequence: Synthetic Heavy chain variable region CDR H2 amino acid sequence
WIYPGNVNTKYNEKFKG

SEQ ID NO: 2918 - DNA, 51 bp, Artificial Sequence; identical to SEQ ID NO: 2806
  Description of Artificial Sequence: Synthetic Heavy chain variable region CDR H2 nucleic acid sequence

SEQ ID NO: 2919 - protein, 10 aa, Artificial Sequence
  Description of Artificial Sequence: Synthetic Heavy chain variable region CDR H3 amino acid sequence
ARDYGYYFDY

SEQ ID NO: 2920 - DNA, 30 bp, Artificial Sequence
  Description of Artificial Sequence: Synthetic Heavy chain variable region CDR H3 nucleic acid sequence
gcaagagactatggttactactttgactat

SEQ ID NO: 2921 - DNA, 336 bp, Artificial Sequence
  Description of Artificial Sequence: Synthetic Light chain variable region nucleic acid sequence
gacattgtgctgacccagtctccatcctccctggctgtgtcagcaggagagaaggtcaccatgagctgcaaatccagtcagagtctgctcaacagtagaacccgaaagaactacttggcttggtaccagcagaaaccagggcagtctcctaaactgctgatctactgggcatccactagggaatctggggtccctgatcgcttcacaggcagtggatctgggacagatttcactctcaccatcagcagtgtgcaggctgaagacctggcagtttattactgcaagcaatcttataatcttcggacgttcggtggagggaccaagctggagctgaaa

SEQ ID NO: 2922 - protein, 112 aa, Artificial Sequence
  Description of Artificial Sequence: Synthetic Light chain variable region amino acid sequence
DIVLTQSPSSLAVSAGEKVTMSCKSSQSLLNSRTRKNYLAWYQQKPGQSPKLLIYWASTRESGVPDRFTGSGSGTDFTLTISSVQAEDLAVYYCKQSYNLRTFGGGTKLELK

SEQ ID NO: 2923 - protein, 17 aa, Artificial Sequence
  Description of Artificial Sequence: Synthetic Light chain variable region CDR L1 amino acid sequence
KSSQSLLNSRTRKNYLA

SEQ ID NO: 2924 - DNA, 51 bp, Artificial Sequence; identical to SEQ ID NO: 2764
  Description of Artificial Sequence: Synthetic Light chain variable region CDR L1 nucleic acid sequence

SEQ ID NO: 2925 - protein, 7 aa, Artificial Sequence
  Description of Artificial Sequence: Synthetic Light chain variable region CDR L2 amino acid sequence
WASTRES

SEQ ID NO: 2926 - DNA, 21 bp, Artificial Sequence
  Description of Artificial Sequence: Synthetic Light chain variable region CDR L2 nucleic acid sequence
tgggcatccactagggaatct

SEQ ID NO: 2927 - protein, 8 aa, Artificial Sequence
  Description of Artificial Sequence: Synthetic Light chain variable region CDR L3 amino acid sequence
KQSYNLRT

SEQ ID NO: 2928 - DNA, 24 bp, Artificial Sequence
  Description of Artificial Sequence: Synthetic Light chain variable region CDR L3 nucleic acid sequence
aagcaatcttataatcttcggacg

SEQ ID NO: 2929 - DNA, 351 bp, Artificial Sequence
  Description of Artificial Sequence: Synthetic Heavy chain variable region nucleic acid sequence
gaggtgcagctggaggagtcaggacctgagctggtgaggcctggggcttcagtgaggatatcctgcaaggcttctggctacaccttcacaagctcctatatacactgggtgaagcagaggcctggacagggacttgagtggattggatggatttatcctggaaatgttaatactaagtacaatgagaagttcaagggcaaggccacactgactgcagacaaatcctccagcacagcctacatgcacctcagcagcctgacctctgaggactctgcggtctatttctgtgcaagagactatggttactactttgactactggggccaaggcaccacggtcaccgtctcctca

SEQ ID NO: 2930 - protein, 117 aa, Artificial Sequence
  Description of Artificial Sequence: Synthetic Heavy chain variable region amino acid sequence
EVQLEESGPELVRPGASVRISCKASGYTFTSSYIHWVKQRPGQGLEWIGWIYPGNVNTKYNEKFKGKATLTADKSSSTAYMHLSSLTSEDSAVYFCARDYGYYFDYWGQGTTVTVSS

SEQ ID NO: 2931 - protein, 9 aa, Artificial Sequence
  Description of Artificial Sequence: Synthetic Heavy chain variable region CDR H1 amino acid sequence
YTFTSSYIH

SEQ ID NO: 2932 - DNA, 27 bp, Artificial Sequence
  Description of Artificial Sequence: Synthetic Heavy chain variable region CDR H1 nucleic acid sequence
tacaccttcacaagctcctatatacac

SEQ ID NO: 2933 - protein, 17 aa, Artificial Sequence
  Description of Artificial Sequence: Synthetic Heavy chain variable region CDR H2 amino acid sequence
WIYPGNVNTKYNEKFKG

SEQ ID NO: 2934 - DNA, 51 bp, Artificial Sequence; identical to SEQ ID NO: 2806
  Description of Artificial Sequence: Synthetic Heavy chain variable region CDR H2 nucleic acid sequence

SEQ ID NO: 2935 - protein, 10 aa, Artificial Sequence
  Description of Artificial Sequence: Synthetic Heavy chain variable region CDR H3 amino acid sequence
ARDYGYYFDY

SEQ ID NO: 2936 - DNA, 30 bp, Artificial Sequence
  Description of Artificial Sequence: Synthetic Heavy chain variable region CDR H3 nucleic acid sequence
gcaagagactatggttactactttgactac

SEQ ID NO: 2937 - DNA, 336 bp, Artificial Sequence
  Description of Artificial Sequence: Synthetic Light chain variable region nucleic acid sequence
gacattgtgctgacccaatctccatcctccctggctgtgtcagcaggagagaaggtcactatgagctgcaaatccagtcagagtctgctcaacagtagaacccgaaagaactacttggcttggtaccagcagaaagcagggcagtctcctaaactgctgatctactgggcatccactagggaatctggggtccctgatcgcttcacaggcagtggatctgggacagatttcactctcaccatcagcagtgtgcaggctgaagacctggcagtttattactgcaagcaatcttataatcttcggacgttcggtggagggaccaagctggagctgaaa

SEQ ID NO: 2938 - protein, 112 aa, Artificial Sequence
  Description of Artificial Sequence: Synthetic Light chain variable region amino acid sequence
DIVLTQSPSSLAVSAGEKVTMSCKSSQSLLNSRTRKNYLAWYQQKAGQSPKLLIYWASTRESGVPDRFTGSGSGTDFTLTISSVQAEDLAVYYCKQSYNLRTFGGGTKLELK

SEQ ID NO: 2939 - protein, 17 aa, Artificial Sequence
  Description of Artificial Sequence: Synthetic Light chain variable region CDR L1 amino acid sequence
KSSQSLLNSRTRKNYLA

SEQ ID NO: 2940 - DNA, 51 bp, Artificial Sequence; identical to SEQ ID NO: 2764
  Description of Artificial Sequence: Synthetic Light chain variable region CDR L1 nucleic acid sequence

SEQ ID NO: 2941 - protein, 7 aa, Artificial Sequence
  Description of Artificial Sequence: Synthetic Light chain variable region CDR L2 amino acid sequence
WASTRES

SEQ ID NO: 2942 - DNA, 21 bp, Artificial Sequence
  Description of Artificial Sequence: Synthetic Light chain variable region CDR L2 nucleic acid sequence
tgggcatccactagggaatct

SEQ ID NO: 2943 - protein, 8 aa, Artificial Sequence
  Description of Artificial Sequence: Synthetic Light chain variable region CDR L3 amino acid sequence
KQSYNLRT

SEQ ID NO: 2944 - DNA, 24 bp, Artificial Sequence
  Description of Artificial Sequence: Synthetic Light chain variable region CDR L3 nucleic acid sequence
aagcaatcttataatcttcggacg

SEQ ID NO: 2945 - DNA, 351 bp, Artificial Sequence
  Description of Artificial Sequence: Synthetic Heavy chain variable region nucleic acid sequence
gaggttcagctggagcagtcaggacctgagctggtgaagcctggggcttcagtgaggatatcctgcaagtcttctggctacaccttcacaagctactatatacactgggtgaagcagaggcctggacagggacttgagtggattggatggatttatcctggaaatgttaatactaaatacaatgagaagttcaagggcaaggccacactgactgcagacaaatcctccagcacagcctacatgcagctcagcagcctgacctctgaggactctgcggtctatttctgtgcaagagactatggttactactttggctcctggggccaaggcaccacggtcaccgtctcctca

SEQ ID NO: 2946 - protein, 117 aa, Artificial Sequence
  Description of Artificial Sequence: Synthetic Heavy chain variable region amino acid sequence
EVQLEQSGPELVKPGASVRISCKSSGYTFTSYYIHWVKQRPGQGLEWIGWIYPGNVNTKYNEKFKGKATLTADKSSSTAYMQLSSLTSEDSAVYFCARDYGYYFGSWGQGTTVTVSS

SEQ ID NO: 2947 - protein, 9 aa, Artificial Sequence
  Description of Artificial Sequence: Synthetic Heavy chain variable region CDR H1 amino acid sequence
YTFTSYYIH

SEQ ID NO: 2948 - DNA, 27 bp, Artificial Sequence
  Description of Artificial Sequence: Synthetic Heavy chain variable region CDR H1 nucleic acid sequence
tacaccttcacaagctactatatacac

SEQ ID NO: 2949 - protein, 17 aa, Artificial Sequence
  Description of Artificial Sequence: Synthetic Heavy chain variable region CDR H2 amino acid sequence
WIYPGNVNTKYNEKFKG

SEQ ID NO: 2950 - DNA, 51 bp, Artificial Sequence; identical to SEQ ID NO: 2790
  Description of Artificial Sequence: Synthetic Heavy chain variable region CDR H2 nucleic acid sequence

SEQ ID NO: 2951 - protein, 10 aa, Artificial Sequence
  Description of Artificial Sequence: Synthetic Heavy chain variable region CDR H3 amino acid sequence
ARDYGYYFGS

SEQ ID NO: 2952 - DNA, 30 bp, Artificial Sequence
  Description of Artificial Sequence: Synthetic Heavy chain variable region CDR H3 nucleic acid sequence
gcaagagactatggttactactttggctcc

SEQ ID NO: 2953 - DNA, 336 bp, Artificial Sequence
  Description of Artificial Sequence: Synthetic Light chain variable region nucleic acid sequence
gacatccagctcacccagtctccatcctccctggctgtgtcagcaggagagaaggtcactatgaactgcaaatccagtcagagtctgctcaacagtagaacccgaaagaactacttggcttggtaccagcagaaaccagggcagtctcctaaattgctgatctactgggcatccactagggaatctggggtccctgatcgcttcacaggcagtggatctgggacagatttcactctcaccatcagcagtgtgcaggctgaagacctggcagtttattactgtaagcaatcttataatcttcggacgttcggtggaggcacaaagctggaaatcaaa

SEQ ID NO: 2954 - protein, 112 aa, Artificial Sequence
  Description of Artificial Sequence: Synthetic Light chain variable region amino acid sequence
DIQLTQSPSSLAVSAGEKVTMNCKSSQSLLNSRTRKNYLAWYQQKPGQSPKLLIYWASTRESGVPDRFTGSGSGTDFTLTISSVQAEDLAVYYCKQSYNLRTFGGGTKLEIK

SEQ ID NO: 2955 - protein, 17 aa, Artificial Sequence
  Description of Artificial Sequence: Synthetic Light chain variable region CDR L1 amino acid sequence
KSSQSLLNSRTRKNYLA

SEQ ID NO: 2956 - DNA, 51 bp, Artificial Sequence; identical to SEQ ID NO: 2764
  Description of Artificial Sequence: Synthetic Light chain variable region CDR L1 nucleic acid sequence

SEQ ID NO: 2957 - protein, 7 aa, Artificial Sequence
  Description of Artificial Sequence: Synthetic Light chain variable region CDR L2 amino acid sequence
WASTRES

SEQ ID NO: 2958 - DNA, 21 bp, Artificial Sequence
  Description of Artificial Sequence: Synthetic Light chain variable region CDR L2 nucleic acid sequence
tgggcatccactagggaatct

SEQ ID NO: 2959 - protein, 8 aa, Artificial Sequence
  Description of Artificial Sequence: Synthetic Light chain variable region CDR L3 amino acid sequence
KQSYNLRT

SEQ ID NO: 2960 - DNA, 24 bp, Artificial Sequence
  Description of Artificial Sequence: Synthetic Light chain variable region CDR L3 nucleic acid sequence
aagcaatcttataatcttcggacg

SEQ ID NO: 2961 - DNA, 357 bp, Artificial Sequence
  Description of Artificial Sequence: Synthetic Heavy chain variable region nucleic acid sequence
gaagtccagctgcagcagtctggacctgagctggtgaagcctggggcttcagtgaggatatcctgcaaggcttctggttacaccttcacaagctactatatacactgggtgaagcagaggcctggacagggacttgagtggattggatggatttatcctggaaatgttaatactaagtacaatgagaagttcaagggcaaggccacactgactgcagacaaatcctccagcacagtctacatgcagctcagcagcctgacctctgaggactctgcggtctatttctgtggaagagattactacggctcgtactactttgacaactggggccaaggcaccacggtcaccgtctcctca

SEQ ID NO: 2962 - protein, 119 aa, Artificial Sequence
  Description of Artificial Sequence: Synthetic Heavy chain variable region amino acid sequence
EVQLQQSGPELVKPGASVRISCKASGYTFTSYYIHWVKQRPGQGLEWIGWIYPGNVNTKYNEKFKGKATLTADKSSSTVYMQLSSLTSEDSAVYFCGRDYYGSYYFDNWGQGTTVTVSS

SEQ ID NO: 2963 - protein, 9 aa, Artificial Sequence
  Description of Artificial Sequence: Synthetic Heavy chain variable region CDR H1 amino acid sequence
YTFTSYYIH

SEQ ID NO: 2964 - DNA, 27 bp, Artificial Sequence
  Description of Artificial Sequence: Synthetic Heavy chain variable region CDR H1 nucleic acid sequence
tacaccttcacaagctactatatacac

SEQ ID NO: 2965 - protein, 17 aa, Artificial Sequence
  Description of Artificial Sequence: Synthetic Heavy chain variable region CDR H2 amino acid sequence
WIYPGNVNTKYNEKFKG

SEQ ID NO: 2966 - DNA, 51 bp, Artificial Sequence; identical to SEQ ID NO: 2806
  Description of Artificial Sequence: Synthetic Heavy chain variable region CDR H2 nucleic acid sequence

SEQ ID NO: 2967 - protein, 12 aa, Artificial Sequence
  Description of Artificial Sequence: Synthetic Heavy chain variable region CDR H3 amino acid sequence
GRDYYGSYYFDN

SEQ ID NO: 2968 - DNA, 36 bp, Artificial Sequence
  Description of Artificial Sequence: Synthetic Heavy chain variable region CDR H3 nucleic acid sequence
ggaagagattactacggctcgtactactttgacaac

SEQ ID NO: 2969 - DNA, 336 bp, Artificial Sequence
  Description of Artificial Sequence: Synthetic Light chain variable region nucleic acid sequence
gacatccagctgactcagtctccatcctccctggctgtgtcagcaggagagaaggtcactatgagctgcaaatccagtcagagtctgctcaacagtagaacccgaaagaactacttggcttggtaccagcagaaaccagggcagcctcctaaactgctgatctactgggcatccactagggaatctggggtccctgatcgcttcacaggcagtggatctgggacagatttcactctcaccatcagcagtgtgcaggctgaggacctggcagtttattactgcaagcaatcttataatcttcggacgttcggtggaggcacaaagttggaaataaaa

SEQ ID NO: 2970 - protein, 112 aa, Artificial Sequence
  Description of Artificial Sequence: Synthetic Light chain variable region amino acid sequence
DIQLTQSPSSLAVSAGEKVTMSCKSSQSLLNSRTRKNYLAWYQQKPGQPPKLLIYWASTRESGVPDRFTGSGSGTDFTLTISSVQAEDLAVYYCKQSYNLRTFGGGTKLEIK

SEQ ID NO: 2971 - protein, 17 aa, Artificial Sequence
  Description of Artificial Sequence: Synthetic Light chain variable region CDR L1 amino acid sequence
KSSQSLLNSRTRKNYLA

SEQ ID NO: 2972 - DNA, 51 bp, Artificial Sequence; identical to SEQ ID NO: 2764
  Description of Artificial Sequence: Synthetic Light chain variable region CDR L1 nucleic acid sequence

SEQ ID NO: 2973 - protein, 7 aa, Artificial Sequence
  Description of Artificial Sequence: Synthetic Light chain variable region CDR L2 amino acid sequence
WASTRES

SEQ ID NO: 2974 - DNA, 21 bp, Artificial Sequence
  Description of Artificial Sequence: Synthetic Light chain variable region CDR L2 nucleic acid sequence
tgggcatccactagggaatct

SEQ ID NO: 2975 - protein, 8 aa, Artificial Sequence
  Description of Artificial Sequence: Synthetic Light chain variable region CDR L3 amino acid sequence
KQSYNLRT

SEQ ID NO: 2976 - DNA, 24 bp, Artificial Sequence
  Description of Artificial Sequence: Synthetic Light chain variable region CDR L3 nucleic acid sequence
aagcaatcttataatcttcggacg

SEQ ID NO: 2977 - DNA, 351 bp, Artificial Sequence
  Description of Artificial Sequence: Synthetic Heavy chain variable region nucleic acid sequence
caggtgcagctggtgcagtctggggctgaggtgaagaagcctggggcctcagtgaaggtttcctgcaaggcatctggatacaccttcaccagctactatatacactgggtgcgacaggcccctggacaagggcttgagtggatgggatggatctaccctggtgatggtagcacaaagtacaacgagaagttcaagggcagagtcaccatgaccagggacacgtccacgagcacagtctacatggagctgagcagcctgagatctgaggacacggcggtgtactactgcgctagggatggctcctactactttgactactggggccaaggaaccctggtcaccgtctcctca

SEQ ID NO: 2978 - protein, 117 aa, Artificial Sequence
  Description of Artificial Sequence: Synthetic Heavy chain variable region amino acid sequence
QVQLVQSGAEVKKPGASVKVSCKASGYTFTSYYIHWVRQAPGQGLEWMGWIYPGDGSTKYNEKFKGRVTMTRDTSTSTVYMELSSLRSEDTAVYYCARDGSYYFDYWGQGTLVTVSS

SEQ ID NO: 2979 - protein, 9 aa, Artificial Sequence
  Description of Artificial Sequence: Synthetic Heavy chain variable region CDR H1 amino acid sequence
YTFTSYYIH

SEQ ID NO: 2980 - DNA, 27 bp, Artificial Sequence
  Description of Artificial Sequence: Synthetic Heavy chain variable region CDR H1 nucleic acid sequence
tacaccttcaccagctactatatacac

SEQ ID NO: 2981 - protein, 17 aa, Artificial Sequence
  Description of Artificial Sequence: Synthetic Heavy chain variable region CDR H2 amino acid sequence
WIYPGDGSTKYNEKFKG

SEQ ID NO: 2982 - DNA, 51 bp, Artificial Sequence
  Description of Artificial Sequence: Synthetic Heavy chain variable region CDR H2 nucleic acid sequence
tggatctaccctggtgatggtagcacaaagtacaacgagaagttcaagggc

SEQ ID NO: 2983 - protein, 10 aa, Artificial Sequence
  Description of Artificial Sequence: Synthetic Heavy chain variable region CDR H3 amino acid sequence
ARDGSYYFDY

SEQ ID NO: 2984 - DNA, 30 bp, Artificial Sequence
  Description of Artificial Sequence: Synthetic Heavy chain variable region CDR H3 nucleic acid sequence
gctagggatggctcctactactttgactac

SEQ ID NO: 2985 - DNA, 336 bp, Artificial Sequence
  Description of Artificial Sequence: Synthetic Light chain variable region nucleic acid sequence
gacatcgtgatgacccagtctccagactccctggctgtgtctctgggcgagagggccaccatcaactgcaagtccagccagagtcttttaaacagcagaaccagaaagaactacttagcttggtaccagcagaaaccaggacagcctcctaagctgctcatttactgggcatctacccgggaatccggggtccctgaccgattcagtggcagcgggtctgggacagatttcactctcaccatcagcagcctgcaggctgaagatgtggcagtttattactgtaagcaatcttattctctgagaactttcggcggagggaccaaggtggagatcaaa

SEQ ID NO: 2986 - protein, 112 aa, Artificial Sequence
  Description of Artificial Sequence: Synthetic Light chain variable region amino acid sequence
DIVMTQSPDSLAVSLGERATINCKSSQSLLNSRTRKNYLAWYQQKPGQPPKLLIYWASTRESGVPDRFSGSGSGTDFTLTISSLQAEDVAVYYCKQSYSLRTFGGGTKVEIK

SEQ ID NO: 2987 - protein, 17 aa, Artificial Sequence
  Description of Artificial Sequence: Synthetic Light chain variable region CDR L1 amino acid sequence
KSSQSLLNSRTRKNYLA

SEQ ID NO: 2988 - DNA, 51 bp, Artificial Sequence
  Description of Artificial Sequence: Synthetic Light chain variable region CDR L1 nucleic acid sequence
aagtccagccagagtcttttaaacagcagaaccagaaagaactacttagct

SEQ ID NO: 2989 - protein, 7 aa, Artificial Sequence
  Description of Artificial Sequence: Synthetic Light chain variable region CDR L2 amino acid sequence
WASTRES

SEQ ID NO: 2990 - DNA, 21 bp, Artificial Sequence
  Description of Artificial Sequence: Synthetic Light chain variable region CDR L2 nucleic acid sequence
tgggcatctacccgggaatcc

SEQ ID NO: 2991 - protein, 8 aa, Artificial Sequence
  Description of Artificial Sequence: Synthetic Light chain variable region CDR L3 amino acid sequence
KQSYSLRT

SEQ ID NO: 2992 - DNA, 24 bp, Artificial Sequence
  Description of Artificial Sequence: Synthetic Light chain variable region CDR L3 nucleic acid sequence
aagcaatcttattctctgagaact

SEQ ID NO: 2993 - DNA, 351 bp, Artificial Sequence
  Description of Artificial Sequence: Synthetic Heavy chain variable region nucleic acid sequence
caggtgcagctggtgcagtctggggctgaggtgaagaagcctgggtcctcagtgaaggtttcctgcaaggcatctggatacaccttcaccagctactatatacactgggtgcgacaggcccctggacaagggcttgagtggatgggatggatctaccctggtgatggtagcacaaagtacaacgagaagttcaagggcagagtcaccataaccgcggacaagtccacgagcacagcctacatggagctgagcagcctgagatctgaggacacggcggtgtactactgcgcgagggatggaagctattactttgactactggggccaaggaaccctggtcaccgtctcctca

SEQ ID NO: 2994 - protein, 117 aa, Artificial Sequence
  Description of Artificial Sequence: Synthetic Heavy chain variable region amino acid sequence
QVQLVQSGAEVKKPGSSVKVSCKASGYTFTSYYIHWVRQAPGQGLEWMGWIYPGDGSTKYNEKFKGRVTITADKSTSTAYMELSSLRSEDTAVYYCARDGSYYFDYWGQGTLVTVSS

SEQ ID NO: 2995 - protein, 9 aa, Artificial Sequence
  Description of Artificial Sequence: Synthetic Heavy chain variable region CDR H1 amino acid sequence
YTFTSYYIH

SEQ ID NO: 2996 - DNA, 27 bp, Artificial Sequence
  Description of Artificial Sequence: Synthetic Heavy chain variable region CDR H1 nucleic acid sequence
tacaccttcaccagctactatatacac

SEQ ID NO: 2997 - protein, 17 aa, Artificial Sequence
  Description of Artificial Sequence: Synthetic Heavy chain variable region CDR H2 amino acid sequence
WIYPGDGSTKYNEKFKG

SEQ ID NO: 2998 - DNA, 51 bp, Artificial Sequence; identical to SEQ ID NO: 2982
  Description of Artificial Sequence: Synthetic Heavy chain variable region CDR H2 nucleic acid sequence

SEQ ID NO: 2999 - protein, 10 aa, Artificial Sequence
  Description of Artificial Sequence: Synthetic Heavy chain variable region CDR H3 amino acid sequence
ARDGSYYFDY

SEQ ID NO: 3000 - DNA, 30 bp, Artificial Sequence
  Description of Artificial Sequence: Synthetic Heavy chain variable region CDR H3 nucleic acid sequence
gcgagggatggaagctattactttgactac

SEQ ID NO: 3001 - DNA, 336 bp, Artificial Sequence; identical to SEQ ID NO: 2985
  Description of Artificial Sequence: Synthetic Light chain variable region nucleic acid sequence

SEQ ID NO: 3002 - protein, 112 aa, Artificial Sequence; identical to SEQ ID NO: 2986
  Description of Artificial Sequence: Synthetic Light chain variable region amino acid sequence

SEQ ID NO: 3003 - protein, 17 aa, Artificial Sequence
  Description of Artificial Sequence: Synthetic Light chain variable region CDR L1 amino acid sequence
KSSQSLLNSRTRKNYLA

SEQ ID NO: 3004 - DNA, 51 bp, Artificial Sequence; identical to SEQ ID NO: 2988
  Description of Artificial Sequence: Synthetic Light chain variable region CDR L1 nucleic acid sequence

SEQ ID NO: 3005 - protein, 7 aa, Artificial Sequence
  Description of Artificial Sequence: Synthetic Light chain variable region CDR L2 amino acid sequence
WASTRES

SEQ ID NO: 3006 - DNA, 21 bp, Artificial Sequence
  Description of Artificial Sequence: Synthetic Light chain variable region CDR L2 nucleic acid sequence
tgggcatctacccgggaatcc

SEQ ID NO: 3007 - protein, 8 aa, Artificial Sequence
  Description of Artificial Sequence: Synthetic Light chain variable region CDR L3 amino acid sequence
KQSYSLRT

SEQ ID NO: 3008 - DNA, 24 bp, Artificial Sequence
  Description of Artificial Sequence: Synthetic Light chain variable region CDR L3 nucleic acid sequence
aagcaatcttattctctgagaact

SEQ ID NO: 3009 - DNA, 351 bp, Artificial Sequence
  Description of Artificial Sequence: Synthetic Heavy chain variable region nucleic acid sequence
caggtgcagctggtgcagtctggggctgaggtgaagaagcctggggcctcagtgaaggtttcctgcaaggcatctggatacaccttcaccagctactatatacactgggtgcgacaggcccctggacaagggcttgagtggataggatggatctaccctggtgatggtagcacaaagtacaacgagaagttcaagggcagagtcaccatgaccgcggacaagtccacgagcacagcctacatggagctgagcagcctgagatctgaggacacggcggtgtactactgcgccagggatggttcctattactttgactactggggccaaggaaccctggtcaccgtctcctca

SEQ ID NO: 3010 - protein, 117 aa, Artificial Sequence
  Description of Artificial Sequence: Synthetic Heavy chain variable region amino acid sequence
QVQLVQSGAEVKKPGASVKVSCKASGYTFTSYYIHWVRQAPGQGLEWIGWIYPGDGSTKYNEKFKGRVTMTADKSTSTAYMELSSLRSEDTAVYYCARDGSYYFDYWGQGTLVTVSS

SEQ ID NO: 3011 - protein, 9 aa, Artificial Sequence
  Description of Artificial Sequence: Synthetic Heavy chain variable region CDR H1 amino acid sequence
YTFTSYYIH

SEQ ID NO: 3012 - DNA, 27 bp, Artificial Sequence
  Description of Artificial Sequence: Synthetic Heavy chain variable region CDR H1 nucleic acid sequence
tacaccttcaccagctactatatacac

SEQ ID NO: 3013 - protein, 17 aa, Artificial Sequence
  Description of Artificial Sequence: Synthetic Heavy chain variable region CDR H2 amino acid sequence
WIYPGDGSTKYNEKFKG

SEQ ID NO: 3014 - DNA, 51 bp, Artificial Sequence; identical to SEQ ID NO: 2982
  Description of Artificial Sequence: Synthetic Heavy chain variable region CDR H2 nucleic acid sequence

SEQ ID NO: 3015 - protein, 10 aa, Artificial Sequence
  Description of Artificial Sequence: Synthetic Heavy chain variable region CDR H3 amino acid sequence
ARDGSYYFDY

SEQ ID NO: 3016 - DNA, 30 bp, Artificial Sequence
  Description of Artificial Sequence: Synthetic Heavy chain variable region CDR H3 nucleic acid sequence
gccagggatggttcctattactttgactac

SEQ ID NO: 3017 - DNA, 336 bp, Artificial Sequence; identical to SEQ ID NO: 2985
  Description of Artificial Sequence: Synthetic Light chain variable region nucleic acid sequence

SEQ ID NO: 3018 - protein, 112 aa, Artificial Sequence; identical to SEQ ID NO: 2986
  Description of Artificial Sequence: Synthetic Light chain variable region amino acid sequence

SEQ ID NO: 3019 - protein, 17 aa, Artificial Sequence
  Description of Artificial Sequence: Synthetic Light chain variable region CDR L1 amino acid sequence
KSSQSLLNSRTRKNYLA

SEQ ID NO: 3020 - DNA, 51 bp, Artificial Sequence; identical to SEQ ID NO: 2988
  Description of Artificial Sequence: Synthetic Light chain variable region CDR L1 nucleic acid sequence

SEQ ID NO: 3021 - protein, 7 aa, Artificial Sequence
  Description of Artificial Sequence: Synthetic Light chain variable region CDR L2 amino acid sequence
WASTRES

SEQ ID NO: 3022 - DNA, 21 bp, Artificial Sequence
  Description of Artificial Sequence: Synthetic Light chain variable region CDR L2 nucleic acid sequence
tgggcatctacccgggaatcc

SEQ ID NO: 3023 - protein, 8 aa, Artificial Sequence
  Description of Artificial Sequence: Synthetic Light chain variable region CDR L3 amino acid sequence
KQSYSLRT

SEQ ID NO: 3024 - DNA, 24 bp, Artificial Sequence
  Description of Artificial Sequence: Synthetic Light chain variable region CDR L3 nucleic acid sequence
aagcaatcttattctctgagaact

SEQ ID NO: 3025 - DNA, 351 bp, Artificial Sequence
  Description of Artificial Sequence: Synthetic Heavy chain variable region nucleic acid sequence
caggtgcagctggtgcagtctggggctgaggtgaagaagcctggggcctcagtgaaggtttcctgcaaggcatctggatacaccttcaccagctactatatacactgggtgcgacaggcccctggacaagggcttgagtggatgggatggatctaccctggtgatggtagcacaaagtacaacgagaagttcaagggcagagtcaccatgaccgcggacaagtccacgagcacagcctacatggagctgagcagcctgagatctgaggacacggcggtgtactactgcgctagagatggctcatattactttgactactggggccaaggaaccctggtcaccgtctcctca

SEQ ID NO: 3026 - protein, 117 aa, Artificial Sequence
  Description of Artificial Sequence: Synthetic Heavy chain variable region amino acid sequence
QVQLVQSGAEVKKPGASVKVSCKASGYTFTSYYIHWVRQAPGQGLEWMGWIYPGDGSTKYNEKFKGRVTMTADKSTSTAYMELSSLRSEDTAVYYCARDGSYYFDYWGQGTLVTVSS

SEQ ID NO: 3027 - protein, 9 aa, Artificial Sequence
  Description of Artificial Sequence: Synthetic Heavy chain variable region CDR H1 amino acid sequence
YTFTSYYIH

SEQ ID NO: 3028 - DNA, 27 bp, Artificial Sequence
  Description of Artificial Sequence: Synthetic Heavy chain variable region CDR H1 nucleic acid sequence
tacaccttcaccagctactatatacac

SEQ ID NO: 3029 - protein, 17 aa, Artificial Sequence
  Description of Artificial Sequence: Synthetic Heavy chain variable region CDR H2 amino acid sequence
WIYPGDGSTKYNEKFKG

SEQ ID NO: 3030 - DNA, 51 bp, Artificial Sequence; identical to SEQ ID NO: 2982
  Description of Artificial Sequence: Synthetic Heavy chain variable region CDR H2 nucleic acid sequence

SEQ ID NO: 3031 - protein, 10 aa, Artificial Sequence
  Description of Artificial Sequence: Synthetic Heavy chain variable region CDR H3 amino acid sequence
ARDGSYYFDY

SEQ ID NO: 3032 - DNA, 30 bp, Artificial Sequence
  Description of Artificial Sequence: Synthetic Heavy chain variable region CDR H3 nucleic acid sequence
gctagagatggctcatattactttgactac

SEQ ID NO: 3033 - DNA, 336 bp, Artificial Sequence; identical to SEQ ID NO: 2985
  Description of Artificial Sequence: Synthetic Light chain variable region nucleic acid sequence

SEQ ID NO: 3034 - protein, 112 aa, Artificial Sequence; identical to SEQ ID NO: 2986
  Description of Artificial Sequence: Synthetic Light chain variable region amino acid sequence

SEQ ID NO: 3035 - protein, 17 aa, Artificial Sequence
  Description of Artificial Sequence: Synthetic Light chain variable region CDR L1 amino acid sequence
KSSQSLLNSRTRKNYLA

SEQ ID NO: 3036 - DNA, 51 bp, Artificial Sequence; identical to SEQ ID NO: 2988
  Description of Artificial Sequence: Synthetic Light chain variable region CDR L1 nucleic acid sequence

SEQ ID NO: 3037 - protein, 7 aa, Artificial Sequence
  Description of Artificial Sequence: Synthetic Light chain variable region CDR L2 amino acid sequence
WASTRES

SEQ ID NO: 3038 - DNA, 21 bp, Artificial Sequence
  Description of Artificial Sequence: Synthetic Light chain variable region CDR L2 nucleic acid sequence
tgggcatctacccgggaatcc

SEQ ID NO: 3039 - protein, 8 aa, Artificial Sequence
  Description of Artificial Sequence: Synthetic Light chain variable region CDR L3 amino acid sequence
KQSYSLRT

SEQ ID NO: 3040 - DNA, 24 bp, Artificial Sequence
  Description of Artificial Sequence: Synthetic Light chain variable region CDR L3 nucleic acid sequence
aagcaatcttattctctgagaact

SEQ ID NO: 3041 - DNA, 351 bp, Artificial Sequence
  Description of Artificial Sequence: Synthetic Heavy chain variable region nucleic acid sequence
caggtgcagctggtgcagtctggggctgaggtgaagaagcctggggcctcagtgaaggtttcctgcaaggcatctggatacaccttcaccagctactatatacactgggtgcgacaggcccctggacaagggcttgagtggataggatggatctaccctggtgatggtagcacaaagtacaacgagaagttcaagggcagaaccaccctgaccgcggacaagtccacgagcacagcctacatggagctgagcagcctgagatctgaggacacggcggtgtactactgcgctagagacggatcttattactttgactactggggccaaggaaccctggtcaccgtctcctca

SEQ ID NO: 3042 - protein, 117 aa, Artificial Sequence
  Description of Artificial Sequence: Synthetic Heavy chain variable region amino acid sequence
QVQLVQSGAEVKKPGASVKVSCKASGYTFTSYYIHWVRQAPGQGLEWIGWIYPGDGSTKYNEKFKGRTTLTADKSTSTAYMELSSLRSEDTAVYYCARDGSYYFDYWGQGTLVTVSS

SEQ ID NO: 3043 - protein, 9 aa, Artificial Sequence
  Description of Artificial Sequence: Synthetic Heavy chain variable region CDR H1 amino acid sequence
YTFTSYYIH

SEQ ID NO: 3044 - DNA, 27 bp, Artificial Sequence
  Description of Artificial Sequence: Synthetic Heavy chain variable region CDR H1 nucleic acid sequence
tacaccttcaccagctactatatacac

SEQ ID NO: 3045 - protein, 17 aa, Artificial Sequence
  Description of Artificial Sequence: Synthetic Heavy chain variable region CDR H2 amino acid sequence
WIYPGDGSTKYNEKFKG

SEQ ID NO: 3046 - DNA, 51 bp, Artificial Sequence; identical to SEQ ID NO: 2982
  Description of Artificial Sequence: Synthetic Heavy chain variable region CDR H2 nucleic acid sequence

SEQ ID NO: 3047 - protein, 10 aa, Artificial Sequence
  Description of Artificial Sequence: Synthetic Heavy chain variable region CDR H3 amino acid sequence
ARDGSYYFDY

SEQ ID NO: 3048 - DNA, 30 bp, Artificial Sequence
  Description of Artificial Sequence: Synthetic Heavy chain variable region CDR H3 nucleic acid sequence
gctagagacggatcttattactttgactac

SEQ ID NO: 3049 - DNA, 336 bp, Artificial Sequence; identical to SEQ ID NO: 2985
  Description of Artificial Sequence: Synthetic Light chain variable region nucleic acid sequence

SEQ ID NO: 3050 - protein, 112 aa, Artificial Sequence; identical to SEQ ID NO: 2986
  Description of Artificial Sequence: Synthetic Light chain variable region amino acid sequence

SEQ ID NO: 3051 - protein, 17 aa, Artificial Sequence
  Description of Artificial Sequence: Synthetic Light chain variable region CDR L1 amino acid sequence
KSSQSLLNSRTRKNYLA

SEQ ID NO: 3052 - DNA, 51 bp, Artificial Sequence; identical to SEQ ID NO: 2988
  Description of Artificial Sequence: Synthetic Light chain variable region CDR L1 nucleic acid sequence

SEQ ID NO: 3053 - protein, 7 aa, Artificial Sequence
  Description of Artificial Sequence: Synthetic Light chain variable region CDR L2 amino acid sequence
WASTRES

SEQ ID NO: 3054 - DNA, 21 bp, Artificial Sequence
  Description of Artificial Sequence: Synthetic Light chain variable region CDR L2 nucleic acid sequence
tgggcatctacccgggaatcc

SEQ ID NO: 3055 - protein, 8 aa, Artificial Sequence
  Description of Artificial Sequence: Synthetic Light chain variable region CDR L3 amino acid sequence
KQSYSLRT

SEQ ID NO: 3056 - DNA, 24 bp, Artificial Sequence
  Description of Artificial Sequence: Synthetic Light chain variable region CDR L3 nucleic acid sequence
aagcaatcttattctctgagaact

SEQ ID NO: 3057 - DNA, 351 bp, Artificial Sequence
  Description of Artificial Sequence: Synthetic Heavy chain variable region nucleic acid sequence
caggtgcagctggtgcagtctggggctgaggtgaagaagcctgggtcctcagtgaaggtttcctgcaaggcatctggatacaccttcaccagctactatatacactgggtgcgacaggcccctggacaagggcttgagtggataggatggatctaccctggtgatggtagcacaaagtacaacgagaagttcaagggcagaaccaccctgaccgcggacaagtccacgagcacagcctacatggagctgagcagcctgagatctgaggacacggcggtgtactactgcgcgagagatggtagctactactttgactactggggccaaggaaccctggtcaccgtctcctca

SEQ ID NO: 3058 - protein, 117 aa, Artificial Sequence
  Description of Artificial Sequence: Synthetic Heavy chain variable region amino acid sequence
QVQLVQSGAEVKKPGSSVKVSCKASGYTFTSYYIHWVRQAPGQGLEWIGWIYPGDGSTKYNEKFKGRTTLTADKSTSTAYMELSSLRSEDTAVYYCARDGSYYFDYWGQGTLVTVSS

SEQ ID NO: 3059 - protein, 9 aa, Artificial Sequence
  Description of Artificial Sequence: Synthetic Heavy chain variable region CDR H1 amino acid sequence
YTFTSYYIH

SEQ ID NO: 3060 - DNA, 27 bp, Artificial Sequence
  Description of Artificial Sequence: Synthetic Heavy chain variable region CDR H1 nucleic acid sequence
tacaccttcaccagctactatatacac

SEQ ID NO: 3061 - protein, 17 aa, Artificial Sequence
  Description of Artificial Sequence: Synthetic Heavy chain variable region CDR H2 amino acid sequence
WIYPGDGSTKYNEKFKG

SEQ ID NO: 3062 - DNA, 51 bp, Artificial Sequence; identical to SEQ ID NO: 2982
  Description of Artificial Sequence: Synthetic Heavy chain variable region CDR H2 nucleic acid sequence

SEQ ID NO: 3063 - protein, 10 aa, Artificial Sequence
  Description of Artificial Sequence: Synthetic Heavy chain variable region CDR H3 amino acid sequence
ARDGSYYFDY

SEQ ID NO: 3064 - DNA, 30 bp, Artificial Sequence
  Description of Artificial Sequence: Synthetic Heavy chain variable region CDR H3 nucleic acid sequence
gcgagagatggtagctactactttgactac

SEQ ID NO: 3065 - DNA, 336 bp, Artificial Sequence
  Description of Artificial Sequence: Synthetic Light chain variable region nucleic acid sequence
gacatcgtgatgacccagtctccagactccctggctgtgtctctgggcgagagggccaccatcaactgcaagtccagccagagtcttttaaacagcagaaccagaaagaactacttagcttggtaccagcagaaaccaggacagcctcctaagctgctcatttactgggcatctacccgggaatccggggtccctgaccgattcagtggcagcgggtctgggacagatttcactctcaccatcagcagcctgcaggctgaagatgtggcagtttattactgtaagcaatcttattctcttagaactttcggcggagggaccaaggtggagatcaaa

SEQ ID NO: 3066 - protein, 112 aa, Artificial Sequence; identical to SEQ ID NO: 2986
  Description of Artificial Sequence: Synthetic Light chain variable region amino acid sequence

SEQ ID NO: 3067 - protein, 17 aa, Artificial Sequence
  Description of Artificial Sequence: Synthetic Light chain variable region CDR L1 amino acid sequence
KSSQSLLNSRTRKNYLA

SEQ ID NO: 3068 - DNA, 51 bp, Artificial Sequence; identical to SEQ ID NO: 2988
  Description of Artificial Sequence: Synthetic Light chain variable region CDR L1 nucleic acid sequence

SEQ ID NO: 3069 - protein, 7 aa, Artificial Sequence
  Description of Artificial Sequence: Synthetic Light chain variable region CDR L2 amino acid sequence
WASTRES

SEQ ID NO: 3070 - DNA, 21 bp, Artificial Sequence
  Description of Artificial Sequence: Synthetic Light chain variable region CDR L2 nucleic acid sequence
tgggcatctacccgggaatcc

SEQ ID NO: 3071 - protein, 8 aa, Artificial Sequence
  Description of Artificial Sequence: Synthetic Light chain variable region CDR L3 amino acid sequence
KQSYSLRT

SEQ ID NO: 3072 - DNA, 24 bp, Artificial Sequence
  Description of Artificial Sequence: Synthetic Light chain variable region CDR L3 nucleic acid sequence
aagcaatcttattctcttagaact

SEQ ID NO: 3073 - DNA, 351 bp, Artificial Sequence; identical to SEQ ID NO: 2977
  Description of Artificial Sequence: Synthetic Heavy chain variable region nucleic acid sequence

SEQ ID NO: 3074 - protein, 117 aa, Artificial Sequence; identical to SEQ ID NO: 2978
  Description of Artificial Sequence: Synthetic Heavy chain variable region amino acid sequence

SEQ ID NO: 3075 - protein, 9 aa, Artificial Sequence
  Description of Artificial Sequence: Synthetic Heavy chain variable region CDR H1 amino acid sequence
YTFTSYYIH

SEQ ID NO: 3076 - DNA, 27 bp, Artificial Sequence
  Description of Artificial Sequence: Synthetic Heavy chain variable region CDR H1 nucleic acid sequence
tacaccttcaccagctactatatacac

SEQ ID NO: 3077 - protein, 17 aa, Artificial Sequence
  Description of Artificial Sequence: Synthetic Heavy chain variable region CDR H2 amino acid sequence
WIYPGDGSTKYNEKFKG

SEQ ID NO: 3078 - DNA, 51 bp, Artificial Sequence; identical to SEQ ID NO: 2982
  Description of Artificial Sequence: Synthetic Heavy chain variable region CDR H2 nucleic acid sequence

SEQ ID NO: 3079 - protein, 10 aa, Artificial Sequence
  Description of Artificial Sequence: Synthetic Heavy chain variable region CDR H3 amino acid sequence
ARDGSYYFDY

SEQ ID NO: 3080 - DNA, 30 bp, Artificial Sequence; identical to SEQ ID NO: 2984
  Description of Artificial Sequence: Synthetic Heavy chain variable region CDR H3 nucleic acid sequence

SEQ ID NO: 3081 - DNA, 336 bp, Artificial Sequence
  Description of Artificial Sequence: Synthetic Light chain variable region nucleic acid sequence
gacatcgtgatgacccagtctccagactccctggctgtgtctctgggcgagagggccaccatcaactgcaagtccagccagagtcttttaaacagcagaaccagaaagaactacttagcttggtaccagcagaaaccaggacagcctcctaagctgctcatttactgggcatctacccgggaatccggggtccctgaccgattcagtggcagcgggtctgggacagatttcactctcaccatcagcagcctgcaggctgaagatgtggcagtttattactgtaagcagagttacaatttgagaactttcggcggagggaccaaggtggagatcaaa

SEQ ID NO: 3082 - protein, 112 aa, Artificial Sequence
  Description of Artificial Sequence: Synthetic Light chain variable region amino acid sequence
DIVMTQSPDSLAVSLGERATINCKSSQSLLNSRTRKNYLAWYQQKPGQPPKLLIYWASTRESGVPDRFSGSGSGTDFTLTISSLQAEDVAVYYCKQSYNLRTFGGGTKVEIK

SEQ ID NO: 3083 - protein, 17 aa, Artificial Sequence
  Description of Artificial Sequence: Synthetic Light chain variable region CDR L1 amino acid sequence
KSSQSLLNSRTRKNYLA

SEQ ID NO: 3084 - DNA, 51 bp, Artificial Sequence; identical to SEQ ID NO: 2988
  Description of Artificial Sequence: Synthetic Light chain variable region CDR L1 nucleic acid sequence

SEQ ID NO: 3085 - protein, 7 aa, Artificial Sequence
  Description of Artificial Sequence: Synthetic Light chain variable region CDR L2 amino acid sequence
WASTRES

SEQ ID NO: 3086 - DNA, 21 bp, Artificial Sequence
  Description of Artificial Sequence: Synthetic Light chain variable region CDR L2 nucleic acid sequence
tgggcatctacccgggaatcc

SEQ ID NO: 3087 - protein, 8 aa, Artificial Sequence
  Description of Artificial Sequence: Synthetic Light chain variable region CDR L3 amino acid sequence
KQSYNLRT

SEQ ID NO: 3088 - DNA, 24 bp, Artificial Sequence
  Description of Artificial Sequence: Synthetic Light chain variable region CDR L3 nucleic acid sequence
aagcagagttacaatttgagaact

SEQ ID NO: 3089 - DNA, 351 bp, Artificial Sequence; identical to SEQ ID NO: 2993
  Description of Artificial Sequence: Synthetic Heavy chain variable region nucleic acid sequence

SEQ ID NO: 3090 - protein, 117 aa, Artificial Sequence; identical to SEQ ID NO: 2994
  Description of Artificial Sequence: Synthetic Heavy chain variable region amino acid sequence

SEQ ID NO: 3091 - protein, 9 aa, Artificial Sequence
  Description of Artificial Sequence: Synthetic Heavy chain variable region CDR H1 amino acid sequence
YTFTSYYIH

SEQ ID NO: 3092 - DNA, 27 bp, Artificial Sequence
  Description of Artificial Sequence: Synthetic Heavy chain variable region CDR H1 nucleic acid sequence
tacaccttcaccagctactatatacac

SEQ ID NO: 3093 - protein, 17 aa, Artificial Sequence
  Description of Artificial Sequence: Synthetic Heavy chain variable region CDR H2 amino acid sequence
WIYPGDGSTKYNEKFKG

SEQ ID NO: 3094 - DNA, 51 bp, Artificial Sequence; identical to SEQ ID NO: 2982
  Description of Artificial Sequence: Synthetic Heavy chain variable region CDR H2 nucleic acid sequence

SEQ ID NO: 3095 - protein, 10 aa, Artificial Sequence
  Description of Artificial Sequence: Synthetic Heavy chain variable region CDR H3 amino acid sequence
ARDGSYYFDY

SEQ ID NO: 3096 - DNA, 30 bp, Artificial Sequence; identical to SEQ ID NO: 3000
  Description of Artificial Sequence: Synthetic Heavy chain variable region CDR H3 nucleic acid sequence

SEQ ID NO: 3097 - DNA, 336 bp, Artificial Sequence; identical to SEQ ID NO: 3081
  Description of Artificial Sequence: Synthetic Light chain variable region nucleic acid sequence

SEQ ID NO: 3098 - protein, 112 aa, Artificial Sequence; identical to SEQ ID NO: 3082
  Description of Artificial Sequence: Synthetic Light chain variable region amino acid sequence

SEQ ID NO: 3099 - protein, 17 aa, Artificial Sequence
  Description of Artificial Sequence: Synthetic Light chain variable region CDR L1 amino acid sequence
KSSQSLLNSRTRKNYLA

SEQ ID NO: 3100 - DNA, 51 bp, Artificial Sequence; identical to SEQ ID NO: 2988
  Description of Artificial Sequence: Synthetic Light chain variable region CDR L1 nucleic acid sequence

SEQ ID NO: 3101 - protein, 7 aa, Artificial Sequence
  Description of Artificial Sequence: Synthetic Light chain variable region CDR L2 amino acid sequence
WASTRES

SEQ ID NO: 3102 - DNA, 21 bp, Artificial Sequence
  Description of Artificial Sequence: Synthetic Light chain variable region CDR L2 nucleic acid sequence
tgggcatctacccgggaatcc

SEQ ID NO: 3103 - protein, 8 aa, Artificial Sequence
  Description of Artificial Sequence: Synthetic Light chain variable region CDR L3 amino acid sequence
KQSYNLRT

SEQ ID NO: 3104 - DNA, 24 bp, Artificial Sequence
  Description of Artificial Sequence: Synthetic Light chain variable region CDR L3 nucleic acid sequence
aagcagagttacaatttgagaact

SEQ ID NO: 3105 - DNA, 351 bp, Artificial Sequence; identical to SEQ ID NO: 3009
  Description of Artificial Sequence: Synthetic Heavy chain variable region nucleic acid sequence

SEQ ID NO: 3106 - protein, 117 aa, Artificial Sequence; identical to SEQ ID NO: 3010
  Description of Artificial Sequence: Synthetic Heavy chain variable region amino acid sequence

SEQ ID NO: 3107 - protein, 9 aa, Artificial Sequence
  Description of Artificial Sequence: Synthetic Heavy chain variable region CDR H1 amino acid sequence
YTFTSYYIH

SEQ ID NO: 3108 - DNA, 27 bp, Artificial Sequence
  Description of Artificial Sequence: Synthetic Heavy chain variable region CDR H1 nucleic acid sequence
tacaccttcaccagctactatatacac

SEQ ID NO: 3109 - protein, 17 aa, Artificial Sequence
  Description of Artificial Sequence: Synthetic Heavy chain variable region CDR H2 amino acid sequence
WIYPGDGSTKYNEKFKG

SEQ ID NO: 3110 - DNA, 51 bp, Artificial Sequence; identical to SEQ ID NO: 2982
  Description of Artificial Sequence: Synthetic Heavy chain variable region CDR H2 nucleic acid sequence

SEQ ID NO: 3111 - protein, 10 aa, Artificial Sequence
  Description of Artificial Sequence: Synthetic Heavy chain variable region CDR H3 amino acid sequence
ARDGSYYFDY

SEQ ID NO: 3112 - DNA, 30 bp, Artificial Sequence; identical to SEQ ID NO: 3016
  Description of Artificial Sequence: Synthetic Heavy chain variable region CDR H3 nucleic acid sequence

SEQ ID NO: 3113 - DNA, 336 bp, Artificial Sequence; identical to SEQ ID NO: 3081
  Description of Artificial Sequence: Synthetic Light chain variable region nucleic acid sequence

SEQ ID NO: 3114 - protein, 112 aa, Artificial Sequence; identical to SEQ ID NO: 3082
  Description of Artificial Sequence: Synthetic Light chain variable region amino acid sequence

SEQ ID NO: 3115 - protein, 17 aa, Artificial Sequence
  Description of Artificial Sequence: Synthetic Light chain variable region CDR L1 amino acid sequence
KSSQSLLNSRTRKNYLA

SEQ ID NO: 3116 - DNA, 51 bp, Artificial Sequence; identical to SEQ ID NO: 2988
  Description of Artificial Sequence: Synthetic Light chain variable region CDR L1 nucleic acid sequence

SEQ ID NO: 3117 - protein, 7 aa, Artificial Sequence
  Description of Artificial Sequence: Synthetic Light chain variable region CDR L2 amino acid sequence
WASTRES

SEQ ID NO: 3118 - DNA, 21 bp, Artificial Sequence
  Description of Artificial Sequence: Synthetic Light chain variable region CDR L2 nucleic acid sequence
tgggcatctacccgggaatcc

SEQ ID NO: 3119 - protein, 8 aa, Artificial Sequence
  Description of Artificial Sequence: Synthetic Light chain variable region CDR L3 amino acid sequence
KQSYNLRT

SEQ ID NO: 3120 - DNA, 24 bp, Artificial Sequence
  Description of Artificial Sequence: Synthetic Light chain variable region CDR L3 nucleic acid sequence
aagcagagttacaatttgagaact

SEQ ID NO: 3121 - DNA, 351 bp, Artificial Sequence; identical to SEQ ID NO: 3025
  Description of Artificial Sequence: Synthetic Heavy chain variable region nucleic acid sequence

SEQ ID NO: 3122 - protein, 117 aa, Artificial Sequence; identical to SEQ ID NO: 3026
  Description of Artificial Sequence: Synthetic Heavy chain variable region amino acid sequence

SEQ ID NO: 3123 - protein, 9 aa, Artificial Sequence
  Description of Artificial Sequence: Synthetic Heavy chain variable region CDR H1 amino acid sequence
YTFTSYYIH

SEQ ID NO: 3124 - DNA, 27 bp, Artificial Sequence
  Description of Artificial Sequence: Synthetic Heavy chain variable region CDR H1 nucleic acid sequence
tacaccttcaccagctactatatacac

SEQ ID NO: 3125 - protein, 17 aa, Artificial Sequence
  Description of Artificial Sequence: Synthetic Heavy chain variable region CDR H2 amino acid sequence
WIYPGDGSTKYNEKFKG

SEQ ID NO: 3126 - DNA, 51 bp, Artificial Sequence; identical to SEQ ID NO: 2982
  Description of Artificial Sequence: Synthetic Heavy chain variable region CDR H2 nucleic acid sequence

SEQ ID NO: 3127 - protein, 10 aa, Artificial Sequence
  Description of Artificial Sequence: Synthetic Heavy chain variable region CDR H3 amino acid sequence
ARDGSYYFDY

SEQ ID NO: 3128 - DNA, 30 bp, Artificial Sequence; identical to SEQ ID NO: 3032
  Description of Artificial Sequence: Synthetic Heavy chain variable region CDR H3 nucleic acid sequence

SEQ ID NO: 3129 - DNA, 336 bp, Artificial Sequence; identical to SEQ ID NO: 3081
  Description of Artificial Sequence: Synthetic Light chain variable region nucleic acid sequence

SEQ ID NO: 3130 - protein, 112 aa, Artificial Sequence; identical to SEQ ID NO: 3082
  Description of Artificial Sequence: Synthetic Light chain variable region amino acid sequence

SEQ ID NO: 3131 - protein, 17 aa, Artificial Sequence
  Description of Artificial Sequence: Synthetic Light chain variable region CDR L1 amino acid sequence
KSSQSLLNSRTRKNYLA

SEQ ID NO: 3132 - DNA, 51 bp, Artificial Sequence; identical to SEQ ID NO: 2988
  Description of Artificial Sequence: Synthetic Light chain variable region CDR L1 nucleic acid sequence

SEQ ID NO: 3133 - protein, 7 aa, Artificial Sequence
  Description of Artificial Sequence: Synthetic Light chain variable region CDR L2 amino acid sequence
WASTRES

SEQ ID NO: 3134 - DNA, 21 bp, Artificial Sequence
  Description of Artificial Sequence: Synthetic Light chain variable region CDR L2 nucleic acid sequence
tgggcatctacccgggaatcc

SEQ ID NO: 3135 - protein, 8 aa, Artificial Sequence
  Description of Artificial Sequence: Synthetic Light chain variable region CDR L3 amino acid sequence
KQSYNLRT

SEQ ID NO: 3136 - DNA, 24 bp, Artificial Sequence
  Description of Artificial Sequence: Synthetic Light chain variable region CDR L3 nucleic acid sequence
aagcagagttacaatttgagaact

SEQ ID NO: 3137 - DNA, 351 bp, Artificial Sequence; identical to SEQ ID NO: 3041
  Description of Artificial Sequence: Synthetic Heavy chain variable region nucleic acid sequence

SEQ ID NO: 3138 - protein, 117 aa, Artificial Sequence; identical to SEQ ID NO: 3042
  Description of Artificial Sequence: Synthetic Heavy chain variable region amino acid sequence

SEQ ID NO: 3139 - protein, 9 aa, Artificial Sequence
  Description of Artificial Sequence: Synthetic Heavy chain variable region CDR H1 amino acid sequence
YTFTSYYIH

SEQ ID NO: 3140 - DNA, 27 bp, Artificial Sequence
  Description of Artificial Sequence: Synthetic Heavy chain variable region CDR H1 nucleic acid sequence
tacaccttcaccagctactatatacac

SEQ ID NO: 3141 - protein, 17 aa, Artificial Sequence
  Description of Artificial Sequence: Synthetic Heavy chain variable region CDR H2 amino acid sequence
WIYPGDGSTKYNEKFKG

SEQ ID NO: 3142 - DNA, 51 bp, Artificial Sequence; identical to SEQ ID NO: 2982
  Description of Artificial Sequence: Synthetic Heavy chain variable region CDR H2 nucleic acid sequence

SEQ ID NO: 3143 - protein, 10 aa, Artificial Sequence
  Description of Artificial Sequence: Synthetic Heavy chain variable region CDR H3 amino acid sequence
ARDGSYYFDY

SEQ ID NO: 3144 - DNA, 30 bp, Artificial Sequence; identical to SEQ ID NO: 3048
  Description of Artificial Sequence: Synthetic Heavy chain variable region CDR H3 nucleic acid sequence

SEQ ID NO: 3145 - DNA, 336 bp, Artificial Sequence; identical to SEQ ID NO: 3081
  Description of Artificial Sequence: Synthetic Light chain variable region nucleic acid sequence

SEQ ID NO: 3146 - protein, 112 aa, Artificial Sequence; identical to SEQ ID NO: 3082
  Description of Artificial Sequence: Synthetic Light chain variable region amino acid sequence

SEQ ID NO: 3147 - protein, 17 aa, Artificial Sequence
  Description of Artificial Sequence: Synthetic Light chain variable region CDR L1 amino acid sequence
KSSQSLLNSRTRKNYLA

SEQ ID NO: 3148 - DNA, 51 bp, Artificial Sequence; identical to SEQ ID NO: 2988
  Description of Artificial Sequence: Synthetic Light chain variable region CDR L1 nucleic acid sequence

SEQ ID NO: 3149 - protein, 7 aa, Artificial Sequence
  Description of Artificial Sequence: Synthetic Light chain variable region CDR L2 amino acid sequence
WASTRES

SEQ ID NO: 3150 - DNA, 21 bp, Artificial Sequence
  Description of Artificial Sequence: Synthetic Light chain variable region CDR L2 nucleic acid sequence
tgggcatctacccgggaatcc

SEQ ID NO: 3151 - protein, 8 aa, Artificial Sequence
  Description of Artificial Sequence: Synthetic Light chain variable region CDR L3 amino acid sequence
KQSYNLRT

SEQ ID NO: 3152 - DNA, 24 bp, Artificial Sequence
  Description of Artificial Sequence: Synthetic Light chain variable region CDR L3 nucleic acid sequence
aagcagagttacaatttgagaact

SEQ ID NO: 3153 - DNA, 351 bp, Artificial Sequence; identical to SEQ ID NO: 3057
  Description of Artificial Sequence: Synthetic Heavy chain variable region nucleic acid sequence

SEQ ID NO: 3154 - protein, 117 aa, Artificial Sequence; identical to SEQ ID NO: 3058
  Description of Artificial Sequence: Synthetic Heavy chain variable region amino acid sequence

SEQ ID NO: 3155 - protein, 9 aa, Artificial Sequence
  Description of Artificial Sequence: Synthetic Heavy chain variable region CDR H1 amino acid sequence
YTFTSYYIH

SEQ ID NO: 3156 - DNA, 27 bp, Artificial Sequence
  Description of Artificial Sequence: Synthetic Heavy chain variable region CDR H1 nucleic acid sequence
tacaccttcaccagctactatatacac

SEQ ID NO: 3157 - protein, 17 aa, Artificial Sequence
  Description of Artificial Sequence: Synthetic Heavy chain variable region CDR H2 amino acid sequence
WIYPGDGSTKYNEKFKG

SEQ ID NO: 3158 - DNA, 51 bp, Artificial Sequence; identical to SEQ ID NO: 2982
  Description of Artificial Sequence: Synthetic Heavy chain variable region CDR H2 nucleic acid sequence

SEQ ID NO: 3159 - protein, 10 aa, Artificial Sequence
  Description of Artificial Sequence: Synthetic Heavy chain variable region CDR H3 amino acid sequence
ARDGSYYFDY

SEQ ID NO: 3160 - DNA, 30 bp, Artificial Sequence; identical to SEQ ID NO: 3064
  Description of Artificial Sequence: Synthetic Heavy chain variable region CDR H3 nucleic acid sequence

SEQ ID NO: 3161 - DNA, 336 bp, Artificial Sequence
  Description of Artificial Sequence: Synthetic Light chain variable region nucleic acid sequence
gacatcgtgatgacccagtctccagactccctggctgtgtctctgggcgagagggccaccatcaactgcaagtccagccagagtcttttaaacagcagaaccagaaagaactacttagcttggtaccagcagaaaccaggacagcctcctaagctgctcatttactgggcatctacccgggaatccggggtccctgaccgattcagtggcagcgggtctgggacagatttcactctcaccatcagcagcctgcaggctgaagatgtggcagtttattactgtaagcagagttacaatttgagaactttcggcggagggaccaagctggagatcaaa

SEQ ID NO: 3162 - protein, 112 aa, Artificial Sequence
  Description of Artificial Sequence: Synthetic Light chain variable region amino acid sequence
DIVMTQSPDSLAVSLGERATINCKSSQSLLNSRTRKNYLAWYQQKPGQPPKLLIYWASTRESGVPDRFSGSGSGTDFTLTISSLQAEDVAVYYCKQSYNLRTFGGGTKLEIK

SEQ ID NO: 3163 - protein, 17 aa, Artificial Sequence
  Description of Artificial Sequence: Synthetic Light chain variable region CDR L1 amino acid sequence
KSSQSLLNSRTRKNYLA

SEQ ID NO: 3164 - DNA, 51 bp, Artificial Sequence; identical to SEQ ID NO: 2988
  Description of Artificial Sequence: Synthetic Light chain variable region CDR L1 nucleic acid sequence

SEQ ID NO: 3165 - protein, 7 aa, Artificial Sequence
  Description of Artificial Sequence: Synthetic Light chain variable region CDR L2 amino acid sequence
WASTRES

SEQ ID NO: 3166 - DNA, 21 bp, Artificial Sequence
  Description of Artificial Sequence: Synthetic Light chain variable region CDR L2 nucleic acid sequence
tgggcatctacccgggaatcc

SEQ ID NO: 3167 - protein, 8 aa, Artificial Sequence
  Description of Artificial Sequence: Synthetic Light chain variable region CDR L3 amino acid sequence
KQSYNLRT

SEQ ID NO: 3168 - DNA, 24 bp, Artificial Sequence
  Description of Artificial Sequence: Synthetic Light chain variable region CDR L3 nucleic acid sequence
aagcagagttacaatttgagaact

SEQ ID NO: 3169 - DNA, 351 bp, Artificial Sequence
  Description of Artificial Sequence: Synthetic Heavy chain variable region nucleic acid sequence
caggtgcagctggtgcagtctggggctgaggtgaagaagcctggggcctcagtgaaggtttcctgcaaggcatctggatacaccttcaccagctcctatatacactgggtgcgacaggcccctggacaaaggcttgagtggatgggatggatctaccctggtaatgttaacacaaagtacaacgagaagttcaagggcagagtcaccataaccagggacacgtccgcgagcacagcctacatggagctgagcagcctgagatctgaggacacggcggtgtactactgcgctagggattatggctactactttgactactggggccaaggaaccctggtcaccgtctcctca

SEQ ID NO: 3170 - protein, 117 aa, Artificial Sequence
  Description of Artificial Sequence: Synthetic Heavy chain variable region amino acid sequence
QVQLVQSGAEVKKPGASVKVSCKASGYTFTSSYIHWVRQAPGQRLEWMGWIYPGNVNTKYNEKFKGRVTITRDTSASTAYMELSSLRSEDTAVYYCARDYGYYFDYWGQGTLVTVSS

SEQ ID NO: 3171 - protein, 9 aa, Artificial Sequence
  Description of Artificial Sequence: Synthetic Heavy chain variable region CDR H1 amino acid sequence
YTFTSSYIH

SEQ ID NO: 3172 - DNA, 27 bp, Artificial Sequence
  Description of Artificial Sequence: Synthetic Heavy chain variable region CDR H1 nucleic acid sequence
tacaccttcaccagctcctatatacac

SEQ ID NO: 3173 - protein, 17 aa, Artificial Sequence
  Description of Artificial Sequence: Synthetic Heavy chain variable region CDR H2 amino acid sequence
WIYPGNVNTKYNEKFKG

SEQ ID NO: 3174 - DNA, 51 bp, Artificial Sequence
  Description of Artificial Sequence: Synthetic Heavy chain variable region CDR H2 nucleic acid sequence
tggatctaccctggtaatgttaacacaaagtacaacgagaagttcaagggc

SEQ ID NO: 3175 - protein, 10 aa, Artificial Sequence
  Description of Artificial Sequence: Synthetic Heavy chain variable region CDR H3 amino acid sequence
ARDYGYYFDY

SEQ ID NO: 3176 - DNA, 30 bp, Artificial Sequence
  Description of Artificial Sequence: Synthetic Heavy chain variable region CDR H3 nucleic acid sequence
gctagggattatggctactactttgactac

SEQ ID NO: 3177 - DNA, 336 bp, Artificial Sequence; identical to SEQ ID NO: 2985
  Description of Artificial Sequence: Synthetic Light chain variable region nucleic acid sequence

SEQ ID NO: 3178 - protein, 112 aa, Artificial Sequence; identical to SEQ ID NO: 2986
  Description of Artificial Sequence: Synthetic Light chain variable region amino acid sequence

SEQ ID NO: 3179 - protein, 17 aa, Artificial Sequence
  Description of Artificial Sequence: Synthetic Light chain variable region CDR L1 amino acid sequence
KSSQSLLNSRTRKNYLA

SEQ ID NO: 3180 - DNA, 51 bp, Artificial Sequence; identical to SEQ ID NO: 2988
  Description of Artificial Sequence: Synthetic Light chain variable region CDR L1 nucleic acid sequence

SEQ ID NO: 3181 - protein, 7 aa, Artificial Sequence
  Description of Artificial Sequence: Synthetic Light chain variable region CDR L2 amino acid sequence
WASTRES

SEQ ID NO: 3182 - DNA, 21 bp, Artificial Sequence
  Description of Artificial Sequence: Synthetic Light chain variable region CDR L2 nucleic acid sequence
tgggcatctacccgggaatcc

SEQ ID NO: 3183 - protein, 8 aa, Artificial Sequence
  Description of Artificial Sequence: Synthetic Light chain variable region CDR L3 amino acid sequence
KQSYSLRT

SEQ ID NO: 3184 - DNA, 24 bp, Artificial Sequence
  Description of Artificial Sequence: Synthetic Light chain variable region CDR L3 nucleic acid sequence
aagcaatcttattctctgagaact

SEQ ID NO: 3185 - DNA, 351 bp, Artificial Sequence
  Description of Artificial Sequence: Synthetic Heavy chain variable region nucleic acid sequence
caggtgcagctggtgcagtctggggctgaggtgaagaagcctggggcctcagtgaaggtttcctgcaaggcatctggatacaccttcaccagctcctatatacactgggtgcgacaggcccctggacaagggcttgagtggataggatggatctaccctggtaatgttaacacaaagtacaacgagaagttcaagggcagagccaccctgaccgcggacaagtccgcgagcacagcctacatgcacctgagcagcctgagatctgaggacacggcggtgtactactgcgcgagagactacggctactactttgactactggggccaaggaaccctggtcaccgtctcctca

SEQ ID NO: 3186 - protein, 117 aa, Artificial Sequence
  Description of Artificial Sequence: Synthetic Heavy chain variable region amino acid sequence
QVQLVQSGAEVKKPGASVKVSCKASGYTFTSSYIHWVRQAPGQGLEWIGWIYPGNVNTKYNEKFKGRATLTADKSASTAYMHLSSLRSEDTAVYYCARDYGYYFDYWGQGTLVTVSS

SEQ ID NO: 3187 - protein, 9 aa, Artificial Sequence
  Description of Artificial Sequence: Synthetic Heavy chain variable region CDR H1 amino acid sequence
YTFTSSYIH

SEQ ID NO: 3188 - DNA, 27 bp, Artificial Sequence
  Description of Artificial Sequence: Synthetic Heavy chain variable region CDR H1 nucleic acid sequence
tacaccttcaccagctcctatatacac

SEQ ID NO: 3189 - protein, 17 aa, Artificial Sequence
  Description of Artificial Sequence: Synthetic Heavy chain variable region CDR H2 amino acid sequence
WIYPGNVNTKYNEKFKG

SEQ ID NO: 3190 - DNA, 51 bp, Artificial Sequence; identical to SEQ ID NO: 3174
  Description of Artificial Sequence: Synthetic Heavy chain variable region CDR H2 nucleic acid sequence

SEQ ID NO: 3191 - protein, 10 aa, Artificial Sequence
  Description of Artificial Sequence: Synthetic Heavy chain variable region CDR H3 amino acid sequence
ARDYGYYFDY

SEQ ID NO: 3192 - DNA, 30 bp, Artificial Sequence
  Description of Artificial Sequence: Synthetic Heavy chain variable region CDR H3 nucleic acid sequence
gcgagagactacggctactactttgactac

SEQ ID NO: 3193 - DNA, 336 bp, Artificial Sequence; identical to SEQ ID NO: 2985
  Description of Artificial Sequence: Synthetic Light chain variable region nucleic acid sequence

SEQ ID NO: 3194 - protein, 112 aa, Artificial Sequence; identical to SEQ ID NO: 2986
  Description of Artificial Sequence: Synthetic Light chain variable region amino acid sequence

SEQ ID NO: 3195 - protein, 17 aa, Artificial Sequence
  Description of Artificial Sequence: Synthetic Light chain variable region CDR L1 amino acid sequence
KSSQSLLNSRTRKNYLA

SEQ ID NO: 3196 - DNA, 51 bp, Artificial Sequence; identical to SEQ ID NO: 2988
  Description of Artificial Sequence: Synthetic Light chain variable region CDR L1 nucleic acid sequence

SEQ ID NO: 3197 - protein, 7 aa, Artificial Sequence
  Description of Artificial Sequence: Synthetic Light chain variable region CDR L2 amino acid sequence
WASTRES

SEQ ID NO: 3198 - DNA, 21 bp, Artificial Sequence
  Description of Artificial Sequence: Synthetic Light chain variable region CDR L2 nucleic acid sequence
tgggcatctacccgggaatcc

SEQ ID NO: 3199 - protein, 8 aa, Artificial Sequence
  Description of Artificial Sequence: Synthetic Light chain variable region CDR L3 amino acid sequence
KQSYSLRT

SEQ ID NO: 3200 - DNA, 24 bp, Artificial Sequence
  Description of Artificial Sequence: Synthetic Light chain variable region CDR L3 nucleic acid sequence
aagcaatcttattctctgagaact

SEQ ID NO: 3201 - DNA, 351 bp, Artificial Sequence
  Description of Artificial Sequence: Synthetic Heavy chain variable region nucleic acid sequence
caggtgcagctggtgcagtctggggctgaggtgaagaagcctggggcctcagtgaaggtttcctgcaaggcatctggatacaccttcaccagctcctatatacactgggtgcgacaggcccctggacaaaggcttgagtggataggatggatctaccctggtaatgttaacacaaagtacaacgagaagttcaagggcagagtcaccataaccgcggacaagtccgcgagcacagcctacatggagctgagcagcctgagatctgaggacacggcggtgtactactgcgcgagggattacggatactactttgactactggggccaaggaaccctggtcaccgtctcctca

SEQ ID NO: 3202 - protein, 117 aa, Artificial Sequence
  Description of Artificial Sequence: Synthetic Heavy chain variable region amino acid sequence
QVQLVQSGAEVKKPGASVKVSCKASGYTFTSSYIHWVRQAPGQRLEWIGWIYPGNVNTKYNEKFKGRVTITADKSASTAYMELSSLRSEDTAVYYCARDYGYYFDYWGQGTLVTVSS

SEQ ID NO: 3203 - protein, 9 aa, Artificial Sequence
  Description of Artificial Sequence: Synthetic Heavy chain variable region CDR H1 amino acid sequence
YTFTSSYIH

SEQ ID NO: 3204 - DNA, 27 bp, Artificial Sequence
  Description of Artificial Sequence: Synthetic Heavy chain variable region CDR H1 nucleic acid sequence
tacaccttcaccagctcctatatacac

SEQ ID NO: 3205 - protein, 17 aa, Artificial Sequence
  Description of Artificial Sequence: Synthetic Heavy chain variable region CDR H2 amino acid sequence
WIYPGNVNTKYNEKFKG

SEQ ID NO: 3206 - DNA, 51 bp, Artificial Sequence; identical to SEQ ID NO: 3174
  Description of Artificial Sequence: Synthetic Heavy chain variable region CDR H2 nucleic acid sequence

SEQ ID NO: 3207 - protein, 10 aa, Artificial Sequence
  Description of Artificial Sequence: Synthetic Heavy chain variable region CDR H3 amino acid sequence
ARDYGYYFDY

SEQ ID NO: 3208 - DNA, 30 bp, Artificial Sequence
  Description of Artificial Sequence: Synthetic Heavy chain variable region CDR H3 nucleic acid sequence
gcgagggattacggatactactttgactac

SEQ ID NO: 3209 - DNA, 336 bp, Artificial Sequence; identical to SEQ ID NO: 2985
  Description of Artificial Sequence: Synthetic Light chain variable region nucleic acid sequence

SEQ ID NO: 3210 - protein, 112 aa, Artificial Sequence; identical to SEQ ID NO: 2986
  Description of Artificial Sequence: Synthetic Light chain variable region amino acid sequence

SEQ ID NO: 3211 - protein, 17 aa, Artificial Sequence
  Description of Artificial Sequence: Synthetic Light chain variable region CDR L1 amino acid sequence
KSSQSLLNSRTRKNYLA

SEQ ID NO: 3212 - DNA, 51 bp, Artificial Sequence; identical to SEQ ID NO: 2988
  Description of Artificial Sequence: Synthetic Light chain variable region CDR L1 nucleic acid sequence

SEQ ID NO: 3213 - protein, 7 aa, Artificial Sequence
  Description of Artificial Sequence: Synthetic Light chain variable region CDR L2 amino acid sequence
WASTRES

SEQ ID NO: 3214 - DNA, 21 bp, Artificial Sequence
  Description of Artificial Sequence: Synthetic Light chain variable region CDR L2 nucleic acid sequence
tgggcatctacccgggaatcc

SEQ ID NO: 3215 - protein, 8 aa, Artificial Sequence
  Description of Artificial Sequence: Synthetic Light chain variable region CDR L3 amino acid sequence
KQSYSLRT

SEQ ID NO: 3216 - DNA, 24 bp, Artificial Sequence
  Description of Artificial Sequence: Synthetic Light chain variable region CDR L3 nucleic acid sequence
aagcaatcttattctctgagaact

SEQ ID NO: 3217 - DNA, 351 bp, Artificial Sequence
  Description of Artificial Sequence: Synthetic Heavy chain variable region nucleic acid sequence
caggtgcagctggtgcagtctggggctgaggtgaagaagcctggggcctcagtgaaggtttcctgcaaggcatctggatacaccttcaccagctcctatatacactgggtgcgacaggcccctggacaagggcttgagtggatgggatggatctaccctggtaatgttaacacaaagtacaacgagaagttcaagggcagagtcaccatgaccagggacacgtccacgagcacagtctacatggagctgagcagcctgagatctgaggacacggcggtgtactactgcgctagggactatggttactactttgactactggggccaaggaaccctggtcaccgtctcctca

SEQ ID NO: 3218 - protein, 117 aa, Artificial Sequence
  Description of Artificial Sequence: Synthetic Heavy chain variable region amino acid sequence
QVQLVQSGAEVKKPGASVKVSCKASGYTFTSSYIHWVRQAPGQGLEWMGWIYPGNVNTKYNEKFKGRVTMTRDTSTSTVYMELSSLRSEDTAVYYCARDYGYYFDYWGQGTLVTVSS

SEQ ID NO: 3219 - protein, 9 aa, Artificial Sequence
  Description of Artificial Sequence: Synthetic Heavy chain variable region CDR H1 amino acid sequence
YTFTSSYIH

SEQ ID NO: 3220 - DNA, 27 bp, Artificial Sequence
  Description of Artificial Sequence: Synthetic Heavy chain variable region CDR H1 nucleic acid sequence
tacaccttcaccagctcctatatacac

SEQ ID NO: 3221 - protein, 17 aa, Artificial Sequence
  Description of Artificial Sequence: Synthetic Heavy chain variable region CDR H2 amino acid sequence
WIYPGNVNTKYNEKFKG

SEQ ID NO: 3222 - DNA, 51 bp, Artificial Sequence; identical to SEQ ID NO: 3174
  Description of Artificial Sequence: Synthetic Heavy chain variable region CDR H2 nucleic acid sequence

SEQ ID NO: 3223 - protein, 10 aa, Artificial Sequence
  Description of Artificial Sequence: Synthetic Heavy chain variable region CDR H3 amino acid sequence
ARDYGYYFDY

SEQ ID NO: 3224 - DNA, 30 bp, Artificial Sequence
  Description of Artificial Sequence: Synthetic Heavy chain variable region CDR H3 nucleic acid sequence
gctagggactatggttactactttgactac

SEQ ID NO: 3225 - DNA, 336 bp, Artificial Sequence; identical to SEQ ID NO: 2985
  Description of Artificial Sequence: Synthetic Light chain variable region nucleic acid sequence

SEQ ID NO: 3226 - protein, 112 aa, Artificial Sequence; identical to SEQ ID NO: 2986
  Description of Artificial Sequence: Synthetic Light chain variable region amino acid sequence

SEQ ID NO: 3227 - protein, 17 aa, Artificial Sequence
  Description of Artificial Sequence: Synthetic Light chain variable region CDR L1 amino acid sequence
KSSQSLLNSRTRKNYLA

SEQ ID NO: 3228 - DNA, 51 bp, Artificial Sequence; identical to SEQ ID NO: 2988
  Description of Artificial Sequence: Synthetic Light chain variable region CDR L1 nucleic acid sequence

SEQ ID NO: 3229 - protein, 7 aa, Artificial Sequence
  Description of Artificial Sequence: Synthetic Light chain variable region CDR L2 amino acid sequence
WASTRES

SEQ ID NO: 3230 - DNA, 21 bp, Artificial Sequence
  Description of Artificial Sequence: Synthetic Light chain variable region CDR L2 nucleic acid sequence
tgggcatctacccgggaatcc

SEQ ID NO: 3231 - protein, 8 aa, Artificial Sequence
  Description of Artificial Sequence: Synthetic Light chain variable region CDR L3 amino acid sequence
KQSYSLRT

SEQ ID NO: 3232 - DNA, 24 bp, Artificial Sequence
  Description of Artificial Sequence: Synthetic Light chain variable region CDR L3 nucleic acid sequence
aagcaatcttattctctgagaact

SEQ ID NO: 3233 - DNA, 351 bp, Artificial Sequence
  Description of Artificial Sequence: Synthetic Heavy chain variable region nucleic acid sequence
caggtgcagctggtgcagtctggggctgaggtgaagaagcctggggcctcagtgaaggtttcctgcaaggcatctggatacaccttcaccagctcctatatacactgggtgcgacaggcccctggacaagggcttgagtggataggatggatctaccctggtaatgttaacacaaagtacaacgagaagttcaagggcagagtcaccatgaccgcggacaagtccacgagcacagcctacatggagctgagcagcctgagatctgaggacacggcggtgtactactgcgctagggactacggttattactttgactactggggccaaggaaccctggtcaccgtctcctca

SEQ ID NO: 3234 - protein, 117 aa, Artificial Sequence
  Description of Artificial Sequence: Synthetic Heavy chain variable region amino acid sequence
QVQLVQSGAEVKKPGASVKVSCKASGYTFTSSYIHWVRQAPGQGLEWIGWIYPGNVNTKYNEKFKGRVTMTADKSTSTAYMELSSLRSEDTAVYYCARDYGYYFDYWGQGTLVTVSS

SEQ ID NO: 3235 - protein, 9 aa, Artificial Sequence
  Description of Artificial Sequence: Synthetic Heavy chain variable region CDR H1 amino acid sequence
YTFTSSYIH

SEQ ID NO: 3236 - DNA, 27 bp, Artificial Sequence
  Description of Artificial Sequence: Synthetic Heavy chain variable region CDR H1 nucleic acid sequence
tacaccttcaccagctcctatatacac

SEQ ID NO: 3237 - protein, 17 aa, Artificial Sequence
  Description of Artificial Sequence: Synthetic Heavy chain variable region CDR H2 amino acid sequence
WIYPGNVNTKYNEKFKG

SEQ ID NO: 3238 - DNA, 51 bp, Artificial Sequence; identical to SEQ ID NO: 3174
  Description of Artificial Sequence: Synthetic Heavy chain variable region CDR H2 nucleic acid sequence

SEQ ID NO: 3239 - protein, 10 aa, Artificial Sequence
  Description of Artificial Sequence: Synthetic Heavy chain variable region CDR H3 amino acid sequence
ARDYGYYFDY

SEQ ID NO: 3240 - DNA, 30 bp, Artificial Sequence
  Description of Artificial Sequence: Synthetic Heavy chain variable region CDR H3 nucleic acid sequence
gctagggactacggttattactttgactac

SEQ ID NO: 3241 - DNA, 336 bp, Artificial Sequence; identical to SEQ ID NO: 2985
  Description of Artificial Sequence: Synthetic Light chain variable region nucleic acid sequence

SEQ ID NO: 3242 - protein, 112 aa, Artificial Sequence; identical to SEQ ID NO: 2986
  Description of Artificial Sequence: Synthetic Light chain variable region amino acid sequence

SEQ ID NO: 3243 - protein, 17 aa, Artificial Sequence
  Description of Artificial Sequence: Synthetic Light chain variable region CDR L1 amino acid sequence
KSSQSLLNSRTRKNYLA

SEQ ID NO: 3244 - DNA, 51 bp, Artificial Sequence; identical to SEQ ID NO: 2988
  Description of Artificial Sequence: Synthetic Light chain variable region CDR L1 nucleic acid sequence

SEQ ID NO: 3245 - protein, 7 aa, Artificial Sequence
  Description of Artificial Sequence: Synthetic Light chain variable region CDR L2 amino acid sequence
WASTRES

SEQ ID NO: 3246 - DNA, 21 bp, Artificial Sequence
  Description of Artificial Sequence: Synthetic Light chain variable region CDR L2 nucleic acid sequence
tgggcatctacccgggaatcc

SEQ ID NO: 3247 - protein, 8 aa, Artificial Sequence
  Description of Artificial Sequence: Synthetic Light chain variable region CDR L3 amino acid sequence
KQSYSLRT

SEQ ID NO: 3248 - DNA, 24 bp, Artificial Sequence
  Description of Artificial Sequence: Synthetic Light chain variable region CDR L3 nucleic acid sequence
aagcaatcttattctctgagaact

SEQ ID NO: 3249 - DNA, 351 bp, Artificial Sequence
  Description of Artificial Sequence: Synthetic Heavy chain variable region nucleic acid sequence
caggtgcagctggtgcagtctggggctgaggtgaagaagcctggggcctcagtgaaggtttcctgcaaggcatctggatacaccttcaccagctcctatatacactgggtgcgacaggcccctggacaagggcttgagtggataggatggatctaccctggtaatgttaacacaaagtacaacgagaagttcaagggcagagccaccctgaccgcggacaagtccacgagcacagcctacatgcacctgagcagcctgagatctgaggacacggcggtgtactactgcgcgagggactatggctactactttgactactggggccaaggaaccctggtcaccgtctcctca

SEQ ID NO: 3250 - protein, 117 aa, Artificial Sequence
  Description of Artificial Sequence: Synthetic Heavy chain variable region amino acid sequence
QVQLVQSGAEVKKPGASVKVSCKASGYTFTSSYIHWVRQAPGQGLEWIGWIYPGNVNTKYNEKFKGRATLTADKSTSTAYMHLSSLRSEDTAVYYCARDYGYYFDYWGQGTLVTVSS

SEQ ID NO: 3251 - protein, 9 aa, Artificial Sequence
  Description of Artificial Sequence: Synthetic Heavy chain variable region CDR H1 amino acid sequence
YTFTSSYIH

SEQ ID NO: 3252 - DNA, 27 bp, Artificial Sequence
  Description of Artificial Sequence: Synthetic Heavy chain variable region CDR H1 nucleic acid sequence
tacaccttcaccagctcctatatacac

SEQ ID NO: 3253 - protein, 17 aa, Artificial Sequence
  Description of Artificial Sequence: Synthetic Heavy chain variable region CDR H2 amino acid sequence
WIYPGNVNTKYNEKFKG

SEQ ID NO: 3254 - DNA, 51 bp, Artificial Sequence; identical to SEQ ID NO: 3174
  Description of Artificial Sequence: Synthetic Heavy chain variable region CDR H2 nucleic acid sequence

SEQ ID NO: 3255 - protein, 10 aa, Artificial Sequence
  Description of Artificial Sequence: Synthetic Heavy chain variable region CDR H3 amino acid sequence
ARDYGYYFDY

SEQ ID NO: 3256 - DNA, 30 bp, Artificial Sequence
  Description of Artificial Sequence: Synthetic Heavy chain variable region CDR H3 nucleic acid sequence
gcgagggactatggctactactttgactac

SEQ ID NO: 3257 - DNA, 336 bp, Artificial Sequence; identical to SEQ ID NO: 2985
  Description of Artificial Sequence: Synthetic Light chain variable region nucleic acid sequence

SEQ ID NO: 3258 - protein, 112 aa, Artificial Sequence; identical to SEQ ID NO: 2986
  Description of Artificial Sequence: Synthetic Light chain variable region amino acid sequence

SEQ ID NO: 3259 - protein, 17 aa, Artificial Sequence
  Description of Artificial Sequence: Synthetic Light chain variable region CDR L1 amino acid sequence
KSSQSLLNSRTRKNYLA

SEQ ID NO: 3260 - DNA, 51 bp, Artificial Sequence; identical to SEQ ID NO: 2988
  Description of Artificial Sequence: Synthetic Light chain variable region CDR L1 nucleic acid sequence

SEQ ID NO: 3261 - protein, 7 aa, Artificial Sequence
  Description of Artificial Sequence: Synthetic Light chain variable region CDR L2 amino acid sequence
WASTRES

SEQ ID NO: 3262 - DNA, 21 bp, Artificial Sequence
  Description of Artificial Sequence: Synthetic Light chain variable region CDR L2 nucleic acid sequence
tgggcatctacccgggaatcc

SEQ ID NO: 3263 - protein, 8 aa, Artificial Sequence
  Description of Artificial Sequence: Synthetic Light chain variable region CDR L3 amino acid sequence
KQSYSLRT

SEQ ID NO: 3264 - DNA, 24 bp, Artificial Sequence
  Description of Artificial Sequence: Synthetic Light chain variable region CDR L3 nucleic acid sequence
aagcaatcttattctctgagaact

SEQ ID NO: 3265 - DNA, 351 bp, Artificial Sequence; identical to SEQ ID NO: 3169
  Description of Artificial Sequence: Synthetic Heavy chain variable region nucleic acid sequence

SEQ ID NO: 3266 - protein, 117 aa, Artificial Sequence; identical to SEQ ID NO: 3170
  Description of Artificial Sequence: Synthetic Heavy chain variable region amino acid sequence

SEQ ID NO: 3267 - protein, 9 aa, Artificial Sequence
  Description of Artificial Sequence: Synthetic Heavy chain variable region CDR H1 amino acid sequence
YTFTSSYIH

SEQ ID NO: 3268 - DNA, 27 bp, Artificial Sequence
  Description of Artificial Sequence: Synthetic Heavy chain variable region CDR H1 nucleic acid sequence
tacaccttcaccagctcctatatacac

SEQ ID NO: 3269 - protein, 17 aa, Artificial Sequence
  Description of Artificial Sequence: Synthetic Heavy chain variable region CDR H2 amino acid sequence
WIYPGNVNTKYNEKFKG

SEQ ID NO: 3270 - DNA, 51 bp, Artificial Sequence; identical to SEQ ID NO: 3174
  Description of Artificial Sequence: Synthetic Heavy chain variable region CDR H2 nucleic acid sequence

SEQ ID NO: 3271 - protein, 10 aa, Artificial Sequence
  Description of Artificial Sequence: Synthetic Heavy chain variable region CDR H3 amino acid sequence
ARDYGYYFDY

SEQ ID NO: 3272 - DNA, 30 bp, Artificial Sequence; identical to SEQ ID NO: 3176
  Description of Artificial Sequence: Synthetic Heavy chain variable region CDR H3 nucleic acid sequence

SEQ ID NO: 3273 - DNA, 336 bp, Artificial Sequence; identical to SEQ ID NO: 3081
  Description of Artificial Sequence: Synthetic Light chain variable region nucleic acid sequence

SEQ ID NO: 3274 - protein, 112 aa, Artificial Sequence; identical to SEQ ID NO: 3082
  Description of Artificial Sequence: Synthetic Light chain variable region amino acid sequence

SEQ ID NO: 3275 - protein, 17 aa, Artificial Sequence
  Description of Artificial Sequence: Synthetic Light chain variable region CDR L1 amino acid sequence
KSSQSLLNSRTRKNYLA

SEQ ID NO: 3276 - DNA, 51 bp, Artificial Sequence; identical to SEQ ID NO: 2988
  Description of Artificial Sequence: Synthetic Light chain variable region CDR L1 nucleic acid sequence

SEQ ID NO: 3277 - protein, 7 aa, Artificial Sequence
  Description of Artificial Sequence: Synthetic Light chain variable region CDR L2 amino acid sequence
WASTRES

SEQ ID NO: 3278 - DNA, 21 bp, Artificial Sequence
  Description of Artificial Sequence: Synthetic Light chain variable region CDR L2 nucleic acid sequence
tgggcatctacccgggaatcc

SEQ ID NO: 3279 - protein, 8 aa, Artificial Sequence
  Description of Artificial Sequence: Synthetic Light chain variable region CDR L3 amino acid sequence
KQSYNLRT

SEQ ID NO: 3280 - DNA, 24 bp, Artificial Sequence
  Description of Artificial Sequence: Synthetic Light chain variable region CDR L3 nucleic acid sequence
aagcagagttacaatttgagaact

SEQ ID NO: 3281 - DNA, 351 bp, Artificial Sequence; identical to SEQ ID NO: 3185
  Description of Artificial Sequence: Synthetic Heavy chain variable region nucleic acid sequence

SEQ ID NO: 3282 - protein, 117 aa, Artificial Sequence; identical to SEQ ID NO: 3186
  Description of Artificial Sequence: Synthetic Heavy chain variable region amino acid sequence

SEQ ID NO: 3283 - protein, 9 aa, Artificial Sequence
  Description of Artificial Sequence: Synthetic Heavy chain variable region CDR H1 amino acid sequence
YTFTSSYIH

SEQ ID NO: 3284 - DNA, 27 bp, Artificial Sequence
  Description of Artificial Sequence: Synthetic Heavy chain variable region CDR H1 nucleic acid sequence
tacaccttcaccagctcctatatacac

SEQ ID NO: 3285 - protein, 17 aa, Artificial Sequence
  Description of Artificial Sequence: Synthetic Heavy chain variable region CDR H2 amino acid sequence
WIYPGNVNTKYNEKFKG

SEQ ID NO: 3286 - DNA, 51 bp, Artificial Sequence; identical to SEQ ID NO: 3174
  Description of Artificial Sequence: Synthetic Heavy chain variable region CDR H2 nucleic acid sequence

SEQ ID NO: 3287 - protein, 10 aa, Artificial Sequence
  Description of Artificial Sequence: Synthetic Heavy chain variable region CDR H3 amino acid sequence
ARDYGYYFDY

SEQ ID NO: 3288 - DNA, 30 bp, Artificial Sequence; identical to SEQ ID NO: 3192
  Description of Artificial Sequence: Synthetic Heavy chain variable region CDR H3 nucleic acid sequence

SEQ ID NO: 3289 - DNA, 336 bp, Artificial Sequence; identical to SEQ ID NO: 3081
  Description of Artificial Sequence: Synthetic Light chain variable region nucleic acid sequence

SEQ ID NO: 3290 - protein, 112 aa, Artificial Sequence; identical to SEQ ID NO: 3082
  Description of Artificial Sequence: Synthetic Light chain variable region amino acid sequence

SEQ ID NO: 3291 - protein, 17 aa, Artificial Sequence
  Description of Artificial Sequence: Synthetic Light chain variable region CDR L1 amino acid sequence
KSSQSLLNSRTRKNYLA

SEQ ID NO: 3292 - DNA, 51 bp, Artificial Sequence; identical to SEQ ID NO: 2988
  Description of Artificial Sequence: Synthetic Light chain variable region CDR L1 nucleic acid sequence

SEQ ID NO: 3293 - protein, 7 aa, Artificial Sequence
  Description of Artificial Sequence: Synthetic Light chain variable region CDR L2 amino acid sequence
WASTRES

SEQ ID NO: 3294 - DNA, 21 bp, Artificial Sequence
  Description of Artificial Sequence: Synthetic Light chain variable region CDR L2 nucleic acid sequence
tgggcatctacccgggaatcc

SEQ ID NO: 3295 - protein, 8 aa, Artificial Sequence
  Description of Artificial Sequence: Synthetic Light chain variable region CDR L3 amino acid sequence
KQSYNLRT

SEQ ID NO: 3296 - DNA, 24 bp, Artificial Sequence
  Description of Artificial Sequence: Synthetic Light chain variable region CDR L3 nucleic acid sequence
aagcagagttacaatttgagaact

SEQ ID NO: 3297 - DNA, 351 bp, Artificial Sequence; identical to SEQ ID NO: 3201
  Description of Artificial Sequence: Synthetic Heavy chain variable region nucleic acid sequence

SEQ ID NO: 3298 - protein, 117 aa, Artificial Sequence; identical to SEQ ID NO: 3202
  Description of Artificial Sequence: Synthetic Heavy chain variable region amino acid sequence

SEQ ID NO: 3299 - protein, 9 aa, Artificial Sequence
  Description of Artificial Sequence: Synthetic Heavy chain variable region CDR H1 amino acid sequence
YTFTSSYIH

SEQ ID NO: 3300 - DNA, 27 bp, Artificial Sequence
  Description of Artificial Sequence: Synthetic Heavy chain variable region CDR H1 nucleic acid sequence
tacaccttcaccagctcctatatacac

SEQ ID NO: 3301 - protein, 17 aa, Artificial Sequence
  Description of Artificial Sequence: Synthetic Heavy chain variable region CDR H2 amino acid sequence
WIYPGNVNTKYNEKFKG

SEQ ID NO: 3302 - DNA, 51 bp, Artificial Sequence; identical to SEQ ID NO: 3174
  Description of Artificial Sequence: Synthetic Heavy chain variable region CDR H2 nucleic acid sequence

SEQ ID NO: 3303 - protein, 10 aa, Artificial Sequence
  Description of Artificial Sequence: Synthetic Heavy chain variable region CDR H3 amino acid sequence
ARDYGYYFDY

SEQ ID NO: 3304 - DNA, 30 bp, Artificial Sequence; identical to SEQ ID NO: 3208
  Description of Artificial Sequence: Synthetic Heavy chain variable region CDR H3 nucleic acid sequence

SEQ ID NO: 3305 - DNA, 336 bp, Artificial Sequence; identical to SEQ ID NO: 3081
  Description of Artificial Sequence: Synthetic Light chain variable region nucleic acid sequence

SEQ ID NO: 3306 - protein, 112 aa, Artificial Sequence; identical to SEQ ID NO: 3082
  Description of Artificial Sequence: Synthetic Light chain variable region amino acid sequence

SEQ ID NO: 3307 - protein, 17 aa, Artificial Sequence
  Description of Artificial Sequence: Synthetic Light chain variable region CDR L1 amino acid sequence
KSSQSLLNSRTRKNYLA

SEQ ID NO: 3308 - DNA, 51 bp, Artificial Sequence; identical to SEQ ID NO: 2988
  Description of Artificial Sequence: Synthetic Light chain variable region CDR L1 nucleic acid sequence

SEQ ID NO: 3309 - protein, 7 aa, Artificial Sequence
  Description of Artificial Sequence: Synthetic Light chain variable region CDR L2 amino acid sequence
WASTRES

SEQ ID NO: 3310 - DNA, 21 bp, Artificial Sequence
  Description of Artificial Sequence: Synthetic Light chain variable region CDR L2 nucleic acid sequence
tgggcatctacccgggaatcc

SEQ ID NO: 3311 - protein, 8 aa, Artificial Sequence
  Description of Artificial Sequence: Synthetic Light chain variable region CDR L3 amino acid sequence
KQSYNLRT

SEQ ID NO: 3312 - DNA, 24 bp, Artificial Sequence
  Description of Artificial Sequence: Synthetic Light chain variable region CDR L3 nucleic acid sequence
aagcagagttacaatttgagaact

SEQ ID NO: 3313 - DNA, 351 bp, Artificial Sequence; identical to SEQ ID NO: 3217
  Description of Artificial Sequence: Synthetic Heavy chain variable region nucleic acid sequence

SEQ ID NO: 3314 - protein, 117 aa, Artificial Sequence; identical to SEQ ID NO: 3218
  Description of Artificial Sequence: Synthetic Heavy chain variable region amino acid sequence

SEQ ID NO: 3315 - protein, 9 aa, Artificial Sequence
  Description of Artificial Sequence: Synthetic Heavy chain variable region CDR H1 amino acid sequence
YTFTSSYIH

SEQ ID NO: 3316 - DNA, 27 bp, Artificial Sequence
  Description of Artificial Sequence: Synthetic Heavy chain variable region CDR H1 nucleic acid sequence
tacaccttcaccagctcctatatacac

SEQ ID NO: 3317 - protein, 17 aa, Artificial Sequence
  Description of Artificial Sequence: Synthetic Heavy chain variable region CDR H2 amino acid sequence
WIYPGNVNTKYNEKFKG

SEQ ID NO: 3318 - DNA, 51 bp, Artificial Sequence; identical to SEQ ID NO: 3174
  Description of Artificial Sequence: Synthetic Heavy chain variable region CDR H2 nucleic acid sequence

SEQ ID NO: 3319 - protein, 10 aa, Artificial Sequence
  Description of Artificial Sequence: Synthetic Heavy chain variable region CDR H3 amino acid sequence
ARDYGYYFDY

SEQ ID NO: 3320 - DNA, 30 bp, Artificial Sequence; identical to SEQ ID NO: 3224
  Description of Artificial Sequence: Synthetic Heavy chain variable region CDR H3 nucleic acid sequence

SEQ ID NO: 3321 - DNA, 336 bp, Artificial Sequence; identical to SEQ ID NO: 3081
  Description of Artificial Sequence: Synthetic Light chain variable region nucleic acid sequence

SEQ ID NO: 3322 - protein, 112 aa, Artificial Sequence; identical to SEQ ID NO: 3082
  Description of Artificial Sequence: Synthetic Light chain variable region amino acid sequence

SEQ ID NO: 3323 - protein, 17 aa, Artificial Sequence
  Description of Artificial Sequence: Synthetic Light chain variable region CDR L1 amino acid sequence
KSSQSLLNSRTRKNYLA

SEQ ID NO: 3324 - DNA, 51 bp, Artificial Sequence; identical to SEQ ID NO: 2988
  Description of Artificial Sequence: Synthetic Light chain variable region CDR L1 nucleic acid sequence

SEQ ID NO: 3325 - protein, 7 aa, Artificial Sequence
  Description of Artificial Sequence: Synthetic Light chain variable region CDR L2 amino acid sequence
WASTRES

SEQ ID NO: 3326 - DNA, 21 bp, Artificial Sequence
  Description of Artificial Sequence: Synthetic Light chain variable region CDR L2 nucleic acid sequence
tgggcatctacccgggaatcc

SEQ ID NO: 3327 - protein, 8 aa, Artificial Sequence
  Description of Artificial Sequence: Synthetic Light chain variable region CDR L3 amino acid sequence
KQSYNLRT

SEQ ID NO: 3328 - DNA, 24 bp, Artificial Sequence
  Description of Artificial Sequence: Synthetic Light chain variable region CDR L3 nucleic acid sequence
aagcagagttacaatttgagaact

SEQ ID NO: 3329 - DNA, 351 bp, Artificial Sequence; identical to SEQ ID NO: 3233
  Description of Artificial Sequence: Synthetic Heavy chain variable region nucleic acid sequence

SEQ ID NO: 3330 - protein, 117 aa, Artificial Sequence; identical to SEQ ID NO: 3234
  Description of Artificial Sequence: Synthetic Heavy chain variable region amino acid sequence

SEQ ID NO: 3331 - protein, 9 aa, Artificial Sequence
  Description of Artificial Sequence: Synthetic Heavy chain variable region CDR H1 amino acid sequence
YTFTSSYIH

SEQ ID NO: 3332 - DNA, 27 bp, Artificial Sequence
  Description of Artificial Sequence: Synthetic Heavy chain variable region CDR H1 nucleic acid sequence
tacaccttcaccagctcctatatacac

SEQ ID NO: 3333 - protein, 17 aa, Artificial Sequence
  Description of Artificial Sequence: Synthetic Heavy chain variable region CDR H2 amino acid sequence
WIYPGNVNTKYNEKFKG

SEQ ID NO: 3334 - DNA, 51 bp, Artificial Sequence; identical to SEQ ID NO: 3174
  Description of Artificial Sequence: Synthetic Heavy chain variable region CDR H2 nucleic acid sequence

SEQ ID NO: 3335 - protein, 10 aa, Artificial Sequence
  Description of Artificial Sequence: Synthetic Heavy chain variable region CDR H3 amino acid sequence
ARDYGYYFDY

SEQ ID NO: 3336 - DNA, 30 bp, Artificial Sequence; identical to SEQ ID NO: 3240
  Description of Artificial Sequence: Synthetic Heavy chain variable region CDR H3 nucleic acid sequence

SEQ ID NO: 3337 - DNA, 336 bp, Artificial Sequence
  Description of Artificial Sequence: Synthetic Light chain variable region nucleic acid sequence
gacatcgtgatgacccagtctccagactccctggctgtgtctctaggcgagagggccaccatcaactgcaagtccagccagagtcttttaaacagcagaaccagaaagaactacttagcttggtaccagcagaaaccaggacagcctcctaagctgctcatttactgggcatctacccgggaatccggggtccctgaccgattcagtggcagcgggtctgggacagatttcactctcaccatcagcagcctgcaggctgaagatgtggcagtttattactgtaagcagagttacaatttgagaactttcggcggagggaccaaggtggagatcaaa

SEQ ID NO: 3338 - protein, 112 aa, Artificial Sequence; identical to SEQ ID NO: 3082
  Description of Artificial Sequence: Synthetic Light chain variable region amino acid sequence

SEQ ID NO: 3339 - protein, 17 aa, Artificial Sequence
  Description of Artificial Sequence: Synthetic Light chain variable region CDR L1 amino acid sequence
KSSQSLLNSRTRKNYLA

SEQ ID NO: 3340 - DNA, 51 bp, Artificial Sequence; identical to SEQ ID NO: 2988
  Description of Artificial Sequence: Synthetic Light chain variable region CDR L1 nucleic acid sequence

SEQ ID NO: 3341 - protein, 7 aa, Artificial Sequence
  Description of Artificial Sequence: Synthetic Light chain variable region CDR L2 amino acid sequence
WASTRES

SEQ ID NO: 3342 - DNA, 21 bp, Artificial Sequence
  Description of Artificial Sequence: Synthetic Light chain variable region CDR L2 nucleic acid sequence
tgggcatctacccgggaatcc

SEQ ID NO: 3343 - protein, 8 aa, Artificial Sequence
  Description of Artificial Sequence: Synthetic Light chain variable region CDR L3 amino acid sequence
KQSYNLRT

SEQ ID NO: 3344 - DNA, 24 bp, Artificial Sequence
  Description of Artificial Sequence: Synthetic Light chain variable region CDR L3 nucleic acid sequence
aagcagagttacaatttgagaact

SEQ ID NO: 3345 - DNA, 351 bp, Artificial Sequence; identical to SEQ ID NO: 3249
  Description of Artificial Sequence: Synthetic Heavy chain variable region nucleic acid sequence

SEQ ID NO: 3346 - protein, 117 aa, Artificial Sequence; identical to SEQ ID NO: 3250
  Description of Artificial Sequence: Synthetic Heavy chain variable region amino acid sequence

SEQ ID NO: 3347 - protein, 9 aa, Artificial Sequence
  Description of Artificial Sequence: Synthetic Heavy chain variable region CDR H1 amino acid sequence
YTFTSSYIH

SEQ ID NO: 3348 - DNA, 27 bp, Artificial Sequence
  Description of Artificial Sequence: Synthetic Heavy chain variable region CDR H1 nucleic acid sequence
tacaccttcaccagctcctatatacac

SEQ ID NO: 3349 - protein, 17 aa, Artificial Sequence
  Description of Artificial Sequence: Synthetic Heavy chain variable region CDR H2 amino acid sequence
WIYPGNVNTKYNEKFKG

SEQ ID NO: 3350 - DNA, 51 bp, Artificial Sequence; identical to SEQ ID NO: 3174
  Description of Artificial Sequence: Synthetic Heavy chain variable region CDR H2 nucleic acid sequence

SEQ ID NO: 3351 - protein, 10 aa, Artificial Sequence
  Description of Artificial Sequence: Synthetic Heavy chain variable region CDR H3 amino acid sequence
ARDYGYYFDY

SEQ ID NO: 3352 - DNA, 30 bp, Artificial Sequence; identical to SEQ ID NO: 3256
  Description of Artificial Sequence: Synthetic Heavy chain variable region CDR H3 nucleic acid sequence

SEQ ID NO: 3353 - DNA, 336 bp, Artificial Sequence; identical to SEQ ID NO: 3081
  Description of Artificial Sequence: Synthetic Light chain variable region nucleic acid sequence

SEQ ID NO: 3354 - protein, 112 aa, Artificial Sequence; identical to SEQ ID NO: 3082
  Description of Artificial Sequence: Synthetic Light chain variable region amino acid sequence

SEQ ID NO: 3355 - protein, 17 aa, Artificial Sequence
  Description of Artificial Sequence: Synthetic Light chain variable region CDR L1 amino acid sequence
KSSQSLLNSRTRKNYLA

SEQ ID NO: 3356 - DNA, 51 bp, Artificial Sequence; identical to SEQ ID NO: 2988
  Description of Artificial Sequence: Synthetic Light chain variable region CDR L1 nucleic acid sequence

SEQ ID NO: 3357 - protein, 7 aa, Artificial Sequence
  Description of Artificial Sequence: Synthetic Light chain variable region CDR L2 amino acid sequence
WASTRES

SEQ ID NO: 3358 - DNA, 21 bp, Artificial Sequence
  Description of Artificial Sequence: Synthetic Light chain variable region CDR L2 nucleic acid sequence
tgggcatctacccgggaatcc

SEQ ID NO: 3359 - protein, 8 aa, Artificial Sequence
  Description of Artificial Sequence: Synthetic Light chain variable region CDR L3 amino acid sequence
KQSYNLRT

SEQ ID NO: 3360 - DNA, 24 bp, Artificial Sequence
  Description of Artificial Sequence: Synthetic Light chain variable region CDR L3 nucleic acid sequence
aagcagagttacaatttgagaact

SEQ ID NO: 3361 - DNA, 357 bp, Artificial Sequence
  Description of Artificial Sequence: Synthetic Heavy chain variable region nucleic acid sequence
caggtgcagctggtgcagtctggggctgaggtgaagaagcctggggcctcagtgaaggtttcctgcaaggcatctggattcaacatcaaggactactatatgcactgggtgcgacaggcccctggacaagggcttgagtggatgggatggatcgaccctgaaaatggtaacacaatctacgacccgaagttccagggcagagtcaccatgaccagggacacgtccacgagcacagtctacatggagctgagcagcctgagatctgaggacacggcggtgtactactgcgctagagacggatatgcaaggtattactttgactactggggccaaggaaccctggtcaccgtctcctca

SEQ ID NO: 3362 - protein, 119 aa, Artificial Sequence
  Description of Artificial Sequence: Synthetic Heavy chain variable region amino acid sequence
QVQLVQSGAEVKKPGASVKVSCKASGFNIKDYYMHWVRQAPGQGLEWMGWIDPENGNTIYDPKFQGRVTMTRDTSTSTVYMELSSLRSEDTAVYYCARDGYARYYFDYWGQGTLVTVSS

SEQ ID NO: 3363 - protein, 9 aa, Artificial Sequence
  Description of Artificial Sequence: Synthetic Heavy chain variable region CDR H1 amino acid sequence
FNIKDYYMH

SEQ ID NO: 3364 - DNA, 27 bp, Artificial Sequence
  Description of Artificial Sequence: Synthetic Heavy chain variable region CDR H1 nucleic acid sequence
ttcaacatcaaggactactatatgcac

SEQ ID NO: 3365 - protein, 17 aa, Artificial Sequence
  Description of Artificial Sequence: Synthetic Heavy chain variable region CDR H2 amino acid sequence
WIDPENGNTIYDPKFQG

SEQ ID NO: 3366 - DNA, 51 bp, Artificial Sequence
  Description of Artificial Sequence: Synthetic Heavy chain variable region CDR H2 nucleic acid sequence
tggatcgaccctgaaaatggtaacacaatctacgacccgaagttccagggc

SEQ ID NO: 3367 - protein, 12 aa, Artificial Sequence
  Description of Artificial Sequence: Synthetic Heavy chain variable region CDR H3 amino acid sequence
ARDGYARYYFDY

SEQ ID NO: 3368 - DNA, 36 bp, Artificial Sequence
  Description of Artificial Sequence: Synthetic Heavy chain variable region CDR H3 nucleic acid sequence
gctagagacggatatgcaaggtattactttgactac

SEQ ID NO: 3369 - DNA, 336 bp, Artificial Sequence; identical to SEQ ID NO: 2985
  Description of Artificial Sequence: Synthetic Light chain variable region nucleic acid sequence

SEQ ID NO: 3370 - protein, 112 aa, Artificial Sequence; identical to SEQ ID NO: 2986
  Description of Artificial Sequence: Synthetic Light chain variable region amino acid sequence

SEQ ID NO: 3371 - protein, 17 aa, Artificial Sequence
  Description of Artificial Sequence: Synthetic Light chain variable region CDR L1 amino acid sequence
KSSQSLLNSRTRKNYLA

SEQ ID NO: 3372 - DNA, 51 bp, Artificial Sequence; identical to SEQ ID NO: 2988
  Description of Artificial Sequence: Synthetic Light chain variable region CDR L1 nucleic acid sequence

SEQ ID NO: 3373 - protein, 7 aa, Artificial Sequence
  Description of Artificial Sequence: Synthetic Light chain variable region CDR L2 amino acid sequence
WASTRES

SEQ ID NO: 3374 - DNA, 21 bp, Artificial Sequence
  Description of Artificial Sequence: Synthetic Light chain variable region CDR L2 nucleic acid sequence
tgggcatctacccgggaatcc

SEQ ID NO: 3375 - protein, 8 aa, Artificial Sequence
  Description of Artificial Sequence: Synthetic Light chain variable region CDR L3 amino acid sequence
KQSYSLRT

SEQ ID NO: 3376 - DNA, 24 bp, Artificial Sequence
  Description of Artificial Sequence: Synthetic Light chain variable region CDR L3 nucleic acid sequence
aagcaatcttattctctgagaact

SEQ ID NO: 3377 - DNA, 357 bp, Artificial Sequence
  Description of Artificial Sequence: Synthetic Heavy chain variable region nucleic acid sequence
caggtgcagctggtgcagtctggggctgaggtgaagaagcctggggcctcagtgaaggtttcctgcaaggcatctggattcaacatcaaggactactatatgcactgggtgcgacaggcccctggacaagggcttgagtggataggatggatcgaccctgaaaatggtaacacaatctacgacccgaagttccagggcagagtcaccatgaccgcggacacgtccacgagcacagcctacatggagctgagcagcctgagatctgaggacacggcggtgtactactgcgcgagggacggttatgctagatattactttgactactggggccaaggaaccctggtcaccgtctcctca

SEQ ID NO: 3378 - protein, 119 aa, Artificial Sequence
  Description of Artificial Sequence: Synthetic Heavy chain variable region amino acid sequence
QVQLVQSGAEVKKPGASVKVSCKASGFNIKDYYMHWVRQAPGQGLEWIGWIDPENGNTIYDPKFQGRVTMTADTSTSTAYMELSSLRSEDTAVYYCARDGYARYYFDYWGQGTLVTVSS

SEQ ID NO: 3379 - protein, 9 aa, Artificial Sequence
  Description of Artificial Sequence: Synthetic Heavy chain variable region CDR H1 amino acid sequence
FNIKDYYMH

SEQ ID NO: 3380 - DNA, 27 bp, Artificial Sequence
  Description of Artificial Sequence: Synthetic Heavy chain variable region CDR H1 nucleic acid sequence
ttcaacatcaaggactactatatgcac

SEQ ID NO: 3381 - protein, 17 aa, Artificial Sequence
  Description of Artificial Sequence: Synthetic Heavy chain variable region CDR H2 amino acid sequence
WIDPENGNTIYDPKFQG

SEQ ID NO: 3382 - DNA, 51 bp, Artificial Sequence; identical to SEQ ID NO: 3366
  Description of Artificial Sequence: Synthetic Heavy chain variable region CDR H2 nucleic acid sequence

SEQ ID NO: 3383 - protein, 12 aa, Artificial Sequence
  Description of Artificial Sequence: Synthetic Heavy chain variable region CDR H3 amino acid sequence
ARDGYARYYFDY

SEQ ID NO: 3384 - DNA, 36 bp, Artificial Sequence
  Description of Artificial Sequence: Synthetic Heavy chain variable region CDR H3 nucleic acid sequence
gcgagggacggttatgctagatattactttgactac

SEQ ID NO: 3385 - DNA, 336 bp, Artificial Sequence; identical to SEQ ID NO: 2985
  Description of Artificial Sequence: Synthetic Light chain variable region nucleic acid sequence

SEQ ID NO: 3386 - protein, 112 aa, Artificial Sequence; identical to SEQ ID NO: 2986
  Description of Artificial Sequence: Synthetic Light chain variable region amino acid sequence

SEQ ID NO: 3387 - protein, 17 aa, Artificial Sequence
  Description of Artificial Sequence: Synthetic Light chain variable region CDR L1 amino acid sequence
KSSQSLLNSRTRKNYLA

SEQ ID NO: 3388 - DNA, 51 bp, Artificial Sequence; identical to SEQ ID NO: 2988
  Description of Artificial Sequence: Synthetic Light chain variable region CDR L1 nucleic acid sequence

SEQ ID NO: 3389 - protein, 7 aa, Artificial Sequence
  Description of Artificial Sequence: Synthetic Light chain variable region CDR L2 amino acid sequence
WASTRES

SEQ ID NO: 3390 - DNA, 21 bp, Artificial Sequence
  Description of Artificial Sequence: Synthetic Light chain variable region CDR L2 nucleic acid sequence
tgggcatctacccgggaatcc

SEQ ID NO: 3391 - protein, 8 aa, Artificial Sequence
  Description of Artificial Sequence: Synthetic Light chain variable region CDR L3 amino acid sequence
KQSYSLRT

SEQ ID NO: 3392 - DNA, 24 bp, Artificial Sequence
  Description of Artificial Sequence: Synthetic Light chain variable region CDR L3 nucleic acid sequence
aagcaatcttattctctgagaact

SEQ ID NO: 3393 - DNA, 357 bp, Artificial Sequence
  Description of Artificial Sequence: Synthetic Heavy chain variable region nucleic acid sequence
caggtgcagctggtgcagtctggggctgaggtgaagaagcctggggcctcagtgaaggtttcctgcaaggcatctggattcaacatcaaggactactatatgcactgggtgcgacaggcccctggacaagggcttgagtggataggatggatcgaccctgaaaatggtaacacaatctacgacccgaagttccagggcagagccaccataaccgcggacacgtccacgaacacagcctacatggagctgagcagcctgagatctgaggacacggcggtgtactactgcgccagagatggttatgccagatactactttgactactggggccaaggaaccctggtcaccgtctcctca

SEQ ID NO: 3394 - protein, 119 aa, Artificial Sequence
  Description of Artificial Sequence: Synthetic Heavy chain variable region amino acid sequence
QVQLVQSGAEVKKPGASVKVSCKASGFNIKDYYMHWVRQAPGQGLEWIGWIDPENGNTIYDPKFQGRATITADTSTNTAYMELSSLRSEDTAVYYCARDGYARYYFDYWGQGTLVTVSS

SEQ ID NO: 3395 - protein, 9 aa, Artificial Sequence
  Description of Artificial Sequence: Synthetic Heavy chain variable region CDR H1 amino acid sequence
FNIKDYYMH

SEQ ID NO: 3396 - DNA, 27 bp, Artificial Sequence
  Description of Artificial Sequence: Synthetic Heavy chain variable region CDR H1 nucleic acid sequence
ttcaacatcaaggactactatatgcac

SEQ ID NO: 3397 - protein, 17 aa, Artificial Sequence
  Description of Artificial Sequence: Synthetic Heavy chain variable region CDR H2 amino acid sequence
WIDPENGNTIYDPKFQG

SEQ ID NO: 3398 - DNA, 51 bp, Artificial Sequence; identical to SEQ ID NO: 3366
  Description of Artificial Sequence: Synthetic Heavy chain variable region CDR H2 nucleic acid sequence

SEQ ID NO: 3399 - protein, 12 aa, Artificial Sequence
  Description of Artificial Sequence: Synthetic Heavy chain variable region CDR H3 amino acid sequence
ARDGYARYYFDY

SEQ ID NO: 3400 - DNA, 36 bp, Artificial Sequence
  Description of Artificial Sequence: Synthetic Heavy chain variable region CDR H3 nucleic acid sequence
gccagagatggttatgccagatactactttgactac

SEQ ID NO: 3401 - DNA, 336 bp, Artificial Sequence; identical to SEQ ID NO: 2985
  Description of Artificial Sequence: Synthetic Light chain variable region nucleic acid sequence

SEQ ID NO: 3402 - protein, 112 aa, Artificial Sequence; identical to SEQ ID NO: 2986
  Description of Artificial Sequence: Synthetic Light chain variable region amino acid sequence

SEQ ID NO: 3403 - protein, 17 aa, Artificial Sequence
  Description of Artificial Sequence: Synthetic Light chain variable region CDR L1 amino acid sequence
KSSQSLLNSRTRKNYLA

SEQ ID NO: 3404 - DNA, 51 bp, Artificial Sequence; identical to SEQ ID NO: 2988
  Description of Artificial Sequence: Synthetic Light chain variable region CDR L1 nucleic acid sequence

SEQ ID NO: 3405 - protein, 7 aa, Artificial Sequence
  Description of Artificial Sequence: Synthetic Light chain variable region CDR L2 amino acid sequence
WASTRES

SEQ ID NO: 3406 - DNA, 21 bp, Artificial Sequence
  Description of Artificial Sequence: Synthetic Light chain variable region CDR L2 nucleic acid sequence
tgggcatctacccgggaatcc

SEQ ID NO: 3407 - protein, 8 aa, Artificial Sequence
  Description of Artificial Sequence: Synthetic Light chain variable region CDR L3 amino acid sequence
KQSYSLRT

SEQ ID NO: 3408 - DNA, 24 bp, Artificial Sequence
  Description of Artificial Sequence: Synthetic Light chain variable region CDR L3 nucleic acid sequence
aagcaatcttattctctgagaact

SEQ ID NO: 3409 - DNA, 357 bp, Artificial Sequence
  Description of Artificial Sequence: Synthetic Heavy chain variable region nucleic acid sequence
caggtgcagctggtgcagtctggggctgaggtgaagaagcctggggcctcagtgaaggtctcctgcaaggcttctggattcaacatcaaggactactatatgcactgggtgcgacaggcccctggacaaaggcttgagtggatgggatggatcgaccctgaaaatggtaacacaatctatgacccgaagtttcagggcagggtcaccataaccagggacacgtccgccagcacagcctacatggagctgagcagcctgagatctgaagacacggcggtgtactactgcgcgagagatggatacgctagatattactttgactactggggccaaggaaccctggtcaccgtctcctca

SEQ ID NO: 3410 - protein, 119 aa, Artificial Sequence
  Description of Artificial Sequence: Synthetic Heavy chain variable region amino acid sequence
QVQLVQSGAEVKKPGASVKVSCKASGFNIKDYYMHWVRQAPGQRLEWMGWIDPENGNTIYDPKFQGRVTITRDTSASTAYMELSSLRSEDTAVYYCARDGYARYYFDYWGQGTLVTVSS

SEQ ID NO: 3411 - protein, 9 aa, Artificial Sequence
  Description of Artificial Sequence: Synthetic Heavy chain variable region CDR H1 amino acid sequence
FNIKDYYMH

SEQ ID NO: 3412 - DNA, 27 bp, Artificial Sequence
  Description of Artificial Sequence: Synthetic Heavy chain variable region CDR H1 nucleic acid sequence
ttcaacatcaaggactactatatgcac

SEQ ID NO: 3413 - protein, 17 aa, Artificial Sequence
  Description of Artificial Sequence: Synthetic Heavy chain variable region CDR H2 amino acid sequence
WIDPENGNTIYDPKFQG

SEQ ID NO: 3414 - DNA, 51 bp, Artificial Sequence
  Description of Artificial Sequence: Synthetic Heavy chain variable region CDR H2 nucleic acid sequence
tggatcgaccctgaaaatggtaacacaatctatgacccgaagtttcagggc

SEQ ID NO: 3415 - protein, 12 aa, Artificial Sequence
  Description of Artificial Sequence: Synthetic Heavy chain variable region CDR H3 amino acid sequence
ARDGYARYYFDY

SEQ ID NO: 3416 - DNA, 36 bp, Artificial Sequence
  Description of Artificial Sequence: Synthetic Heavy chain variable region CDR H3 nucleic acid sequence
gcgagagatggatacgctagatattactttgactac

SEQ ID NO: 3417 - DNA, 336 bp, Artificial Sequence; identical to SEQ ID NO: 2985
  Description of Artificial Sequence: Synthetic Light chain variable region nucleic acid sequence

SEQ ID NO: 3418 - protein, 112 aa, Artificial Sequence; identical to SEQ ID NO: 2986
  Description of Artificial Sequence: Synthetic Light chain variable region amino acid sequence

SEQ ID NO: 3419 - protein, 17 aa, Artificial Sequence
  Description of Artificial Sequence: Synthetic Light chain variable region CDR L1 amino acid sequence
KSSQSLLNSRTRKNYLA

SEQ ID NO: 3420 - DNA, 51 bp, Artificial Sequence; identical to SEQ ID NO: 2988
  Description of Artificial Sequence: Synthetic Light chain variable region CDR L1 nucleic acid sequence

SEQ ID NO: 3421 - protein, 7 aa, Artificial Sequence
  Description of Artificial Sequence: Synthetic Light chain variable region CDR L2 amino acid sequence
WASTRES

SEQ ID NO: 3422 - DNA, 21 bp, Artificial Sequence
  Description of Artificial Sequence: Synthetic Light chain variable region CDR L2 nucleic acid sequence
tgggcatctacccgggaatcc

SEQ ID NO: 3423 - protein, 8 aa, Artificial Sequence
  Description of Artificial Sequence: Synthetic Light chain variable region CDR L3 amino acid sequence
KQSYSLRT

SEQ ID NO: 3424 - DNA, 24 bp, Artificial Sequence
  Description of Artificial Sequence: Synthetic Light chain variable region CDR L3 nucleic acid sequence
aagcaatcttattctctgagaact

SEQ ID NO: 3425 - DNA, 357 bp, Artificial Sequence
  Description of Artificial Sequence: Synthetic Heavy chain variable region nucleic acid sequence
caggtgcagctggtgcagtctggggctgaggtgaagaagcctggggcctcagtgaaggtctcctgcaaggcttctggattcaacatcaaggactactatatgcactgggtgcgacaggcccctggacaaaggcttgagtggataggatggatcgaccctgaaaatggtaacacaatctatgacccgaagtttcagggcagggtcaccataaccgcggacacgtccgccagcacagcctacatggagctgagcagcctgagatctgaagacacggcggtgtactactgcgctagagacggttacgccagatattactttgactactggggccaaggaaccctggtcaccgtctcctca

SEQ ID NO: 3426 - protein, 119 aa, Artificial Sequence
  Description of Artificial Sequence: Synthetic Heavy chain variable region amino acid sequence
QVQLVQSGAEVKKPGASVKVSCKASGFNIKDYYMHWVRQAPGQRLEWIGWIDPENGNTIYDPKFQGRVTITADTSASTAYMELSSLRSEDTAVYYCARDGYARYYFDYWGQGTLVTVSS

SEQ ID NO: 3427 - protein, 9 aa, Artificial Sequence
  Description of Artificial Sequence: Synthetic Heavy chain variable region CDR H1 amino acid sequence
FNIKDYYMH

SEQ ID NO: 3428 - DNA, 27 bp, Artificial Sequence
  Description of Artificial Sequence: Synthetic Heavy chain variable region CDR H1 nucleic acid sequence
ttcaacatcaaggactactatatgcac

SEQ ID NO: 3429 - protein, 17 aa, Artificial Sequence
  Description of Artificial Sequence: Synthetic Heavy chain variable region CDR H2 amino acid sequence
WIDPENGNTIYDPKFQG

SEQ ID NO: 3430 - DNA, 51 bp, Artificial Sequence; identical to SEQ ID NO: 3414
  Description of Artificial Sequence: Synthetic Heavy chain variable region CDR H2 nucleic acid sequence

SEQ ID NO: 3431 - protein, 12 aa, Artificial Sequence
  Description of Artificial Sequence: Synthetic Heavy chain variable region CDR H3 amino acid sequence
ARDGYARYYFDY

SEQ ID NO: 3432 - DNA, 36 bp, Artificial Sequence
  Description of Artificial Sequence: Synthetic Heavy chain variable region CDR H3 nucleic acid sequence
gctagagacggttacgccagatattactttgactac

SEQ ID NO: 3433 - DNA, 336 bp, Artificial Sequence; identical to SEQ ID NO: 2985
  Description of Artificial Sequence: Synthetic Light chain variable region nucleic acid sequence

SEQ ID NO: 3434 - protein, 112 aa, Artificial Sequence; identical to SEQ ID NO: 2986
  Description of Artificial Sequence: Synthetic Light chain variable region amino acid sequence

SEQ ID NO: 3435 - protein, 17 aa, Artificial Sequence
  Description of Artificial Sequence: Synthetic Light chain variable region CDR L1 amino acid sequence
KSSQSLLNSRTRKNYLA

SEQ ID NO: 3436 - DNA, 51 bp, Artificial Sequence; identical to SEQ ID NO: 2988
  Description of Artificial Sequence: Synthetic Light chain variable region CDR L1 nucleic acid sequence

SEQ ID NO: 3437 - protein, 7 aa, Artificial Sequence
  Description of Artificial Sequence: Synthetic Light chain variable region CDR L2 amino acid sequence
WASTRES

SEQ ID NO: 3438 - DNA, 21 bp, Artificial Sequence
  Description of Artificial Sequence: Synthetic Light chain variable region CDR L2 nucleic acid sequence
tgggcatctacccgggaatcc

SEQ ID NO: 3439 - protein, 8 aa, Artificial Sequence
  Description of Artificial Sequence: Synthetic Light chain variable region CDR L3 amino acid sequence
KQSYSLRT

SEQ ID NO: 3440 - DNA, 24 bp, Artificial Sequence
  Description of Artificial Sequence: Synthetic Light chain variable region CDR L3 nucleic acid sequence
aagcaatcttattctctgagaact

SEQ ID NO: 3441 - DNA, 357 bp, Artificial Sequence
  Description of Artificial Sequence: Synthetic Heavy chain variable region nucleic acid sequence
caggtgcagctggtgcagtctggggctgaggtgaagaagcctggggcctcagtgaaggtctcctgcaaggcttctggattcaacatcaaggactactatatgcactgggtgcgacaggcccctggacaaaggcttgagtggataggatggatcgaccctgaaaatggtaacacaatctatgacccgaagtttcagggcagggccaccataaccgcggacacgtccgccaacacagcctacatggagctgagcagcctgagatctgaagacacggcggtgtactactgcgcgagagacggatacgcgagatactactttgactactggggccaaggaaccctggtcaccgtctcctca

SEQ ID NO: 3442 - protein, 119 aa, Artificial Sequence
  Description of Artificial Sequence: Synthetic Heavy chain variable region amino acid sequence
QVQLVQSGAEVKKPGASVKVSCKASGFNIKDYYMHWVRQAPGQRLEWIGWIDPENGNTIYDPKFQGRATITADTSANTAYMELSSLRSEDTAVYYCARDGYARYYFDYWGQGTLVTVSS

SEQ ID NO: 3443 - protein, 9 aa, Artificial Sequence
  Description of Artificial Sequence: Synthetic Heavy chain variable region CDR H1 amino acid sequence
FNIKDYYMH

SEQ ID NO: 3444 - DNA, 27 bp, Artificial Sequence
  Description of Artificial Sequence: Synthetic Heavy chain variable region CDR H1 nucleic acid sequence
ttcaacatcaaggactactatatgcac

SEQ ID NO: 3445 - protein, 17 aa, Artificial Sequence
  Description of Artificial Sequence: Synthetic Heavy chain variable region CDR H2 amino acid sequence
WIDPENGNTIYDPKFQG

SEQ ID NO: 3446 - DNA, 51 bp, Artificial Sequence; identical to SEQ ID NO: 3414
  Description of Artificial Sequence: Synthetic Heavy chain variable region CDR H2 nucleic acid sequence

SEQ ID NO: 3447 - protein, 12 aa, Artificial Sequence
  Description of Artificial Sequence: Synthetic Heavy chain variable region CDR H3 amino acid sequence
ARDGYARYYFDY

SEQ ID NO: 3448 - DNA, 36 bp, Artificial Sequence
  Description of Artificial Sequence: Synthetic Heavy chain variable region CDR H3 nucleic acid sequence
gcgagagacggatacgcgagatactactttgactac

SEQ ID NO: 3449 - DNA, 336 bp, Artificial Sequence; identical to SEQ ID NO: 2985
  Description of Artificial Sequence: Synthetic Light chain variable region nucleic acid sequence

SEQ ID NO: 3450 - protein, 112 aa, Artificial Sequence; identical to SEQ ID NO: 2986
  Description of Artificial Sequence: Synthetic Light chain variable region amino acid sequence

SEQ ID NO: 3451 - protein, 17 aa, Artificial Sequence
  Description of Artificial Sequence: Synthetic Light chain variable region CDR L1 amino acid sequence
KSSQSLLNSRTRKNYLA

SEQ ID NO: 3452 - DNA, 51 bp, Artificial Sequence; identical to SEQ ID NO: 2988
  Description of Artificial Sequence: Synthetic Light chain variable region CDR L1 nucleic acid sequence

SEQ ID NO: 3453 - protein, 7 aa, Artificial Sequence
  Description of Artificial Sequence: Synthetic Light chain variable region CDR L2 amino acid sequence
WASTRES

SEQ ID NO: 3454 - DNA, 21 bp, Artificial Sequence
  Description of Artificial Sequence: Synthetic Light chain variable region CDR L2 nucleic acid sequence
tgggcatctacccgggaatcc

SEQ ID NO: 3455 - protein, 8 aa, Artificial Sequence
  Description of Artificial Sequence: Synthetic Light chain variable region CDR L3 amino acid sequence
KQSYSLRT

SEQ ID NO: 3456 - DNA, 24 bp, Artificial Sequence
  Description of Artificial Sequence: Synthetic Light chain variable region CDR L3 nucleic acid sequence
aagcaatcttattctctgagaact

SEQ ID NO: 3457 - DNA, 357 bp, Artificial Sequence; identical to SEQ ID NO: 3361
  Description of Artificial Sequence: Synthetic Heavy chain variable region nucleic acid sequence

SEQ ID NO: 3458 - protein, 119 aa, Artificial Sequence; identical to SEQ ID NO: 3362
  Description of Artificial Sequence: Synthetic Heavy chain variable region amino acid sequence

SEQ ID NO: 3459 - protein, 9 aa, Artificial Sequence
  Description of Artificial Sequence: Synthetic Heavy chain variable region CDR H1 amino acid sequence
FNIKDYYMH

SEQ ID NO: 3460 - DNA, 27 bp, Artificial Sequence
  Description of Artificial Sequence: Synthetic Heavy chain variable region CDR H1 nucleic acid sequence
ttcaacatcaaggactactatatgcac

SEQ ID NO: 3461 - protein, 17 aa, Artificial Sequence
  Description of Artificial Sequence: Synthetic Heavy chain variable region CDR H2 amino acid sequence
WIDPENGNTIYDPKFQG

SEQ ID NO: 3462 - DNA, 51 bp, Artificial Sequence; identical to SEQ ID NO: 3366
  Description of Artificial Sequence: Synthetic Heavy chain variable region CDR H2 nucleic acid sequence

SEQ ID NO: 3463 - protein, 12 aa, Artificial Sequence
  Description of Artificial Sequence: Synthetic Heavy chain variable region CDR H3 amino acid sequence
ARDGYARYYFDY

SEQ ID NO: 3464 - DNA, 36 bp, Artificial Sequence; identical to SEQ ID NO: 3368
  Description of Artificial Sequence: Synthetic Heavy chain variable region CDR H3 nucleic acid sequence

SEQ ID NO: 3465 - DNA, 336 bp, Artificial Sequence; identical to SEQ ID NO: 3081
  Description of Artificial Sequence: Synthetic Light chain variable region nucleic acid sequence

SEQ ID NO: 3466 - protein, 112 aa, Artificial Sequence; identical to SEQ ID NO: 3082
  Description of Artificial Sequence: Synthetic Light chain variable region amino acid sequence

SEQ ID NO: 3467 - protein, 17 aa, Artificial Sequence
  Description of Artificial Sequence: Synthetic Light chain variable region CDR L1 amino acid sequence
KSSQSLLNSRTRKNYLA

SEQ ID NO: 3468 - DNA, 51 bp, Artificial Sequence; identical to SEQ ID NO: 2988
  Description of Artificial Sequence: Synthetic Light chain variable region CDR L1 nucleic acid sequence

SEQ ID NO: 3469 - protein, 7 aa, Artificial Sequence
  Description of Artificial Sequence: Synthetic Light chain variable region CDR L2 amino acid sequence
WASTRES

SEQ ID NO: 3470 - DNA, 21 bp, Artificial Sequence
  Description of Artificial Sequence: Synthetic Light chain variable region CDR L2 nucleic acid sequence
tgggcatctacccgggaatcc

SEQ ID NO: 3471 - protein, 8 aa, Artificial Sequence
  Description of Artificial Sequence: Synthetic Light chain variable region CDR L3 amino acid sequence
KQSYNLRT

SEQ ID NO: 3472 - DNA, 24 bp, Artificial Sequence
  Description of Artificial Sequence: Synthetic Light chain variable region CDR L3 nucleic acid sequence
aagcagagttacaatttgagaact

SEQ ID NO: 3473 - DNA, 357 bp, Artificial Sequence; identical to SEQ ID NO: 3393
  Description of Artificial Sequence: Synthetic Heavy chain variable region nucleic acid sequence

SEQ ID NO: 3474 - protein, 119 aa, Artificial Sequence; identical to SEQ ID NO: 3394
  Description of Artificial Sequence: Synthetic Heavy chain variable region amino acid sequence

SEQ ID NO: 3475 - protein, 9 aa, Artificial Sequence
  Description of Artificial Sequence: Synthetic Heavy chain variable region CDR H1 amino acid sequence
FNIKDYYMH

SEQ ID NO: 3476 - DNA, 27 bp, Artificial Sequence
  Description of Artificial Sequence: Synthetic Heavy chain variable region CDR H1 nucleic acid sequence
ttcaacatcaaggactactatatgcac

SEQ ID NO: 3477 - protein, 17 aa, Artificial Sequence
  Description of Artificial Sequence: Synthetic Heavy chain variable region CDR H2 amino acid sequence
WIDPENGNTIYDPKFQG

SEQ ID NO: 3478 - DNA, 51 bp, Artificial Sequence; identical to SEQ ID NO: 3366
  Description of Artificial Sequence: Synthetic Heavy chain variable region CDR H2 nucleic acid sequence

SEQ ID NO: 3479 - protein, 12 aa, Artificial Sequence
  Description of Artificial Sequence: Synthetic Heavy chain variable region CDR H3 amino acid sequence
ARDGYARYYFDY

SEQ ID NO: 3480 - DNA, 36 bp, Artificial Sequence; identical to SEQ ID NO: 3400
  Description of Artificial Sequence: Synthetic Heavy chain variable region CDR H3 nucleic acid sequence

SEQ ID NO: 3481 - DNA, 336 bp, Artificial Sequence; identical to SEQ ID NO: 3081
  Description of Artificial Sequence: Synthetic Light chain variable region nucleic acid sequence

SEQ ID NO: 3482 - protein, 112 aa, Artificial Sequence; identical to SEQ ID NO: 3082
  Description of Artificial Sequence: Synthetic Light chain variable region amino acid sequence

SEQ ID NO: 3483 - protein, 17 aa, Artificial Sequence
  Description of Artificial Sequence: Synthetic Light chain variable region CDR L1 amino acid sequence
KSSQSLLNSRTRKNYLA

SEQ ID NO: 3484 - DNA, 51 bp, Artificial Sequence; identical to SEQ ID NO: 2988
  Description of Artificial Sequence: Synthetic Light chain variable region CDR L1 nucleic acid sequence

SEQ ID NO: 3485 - protein, 7 aa, Artificial Sequence
  Description of Artificial Sequence: Synthetic Light chain variable region CDR L2 amino acid sequence
WASTRES

SEQ ID NO: 3486 - DNA, 21 bp, Artificial Sequence
  Description of Artificial Sequence: Synthetic Light chain variable region CDR L2 nucleic acid sequence
tgggcatctacccgggaatcc

SEQ ID NO: 3487 - protein, 8 aa, Artificial Sequence
  Description of Artificial Sequence: Synthetic Light chain variable region CDR L3 amino acid sequence
KQSYNLRT

SEQ ID NO: 3488 - DNA, 24 bp, Artificial Sequence
  Description of Artificial Sequence: Synthetic Light chain variable region CDR L3 nucleic acid sequence
aagcagagttacaatttgagaact

SEQ ID NO: 3489 - DNA, 357 bp, Artificial Sequence; identical to SEQ ID NO: 3409
  Description of Artificial Sequence: Synthetic Heavy chain variable region nucleic acid sequence

SEQ ID NO: 3490 - protein, 119 aa, Artificial Sequence; identical to SEQ ID NO: 3410
  Description of Artificial Sequence: Synthetic Heavy chain variable region amino acid sequence

SEQ ID NO: 3491 - protein, 9 aa, Artificial Sequence
  Description of Artificial Sequence: Synthetic Heavy chain variable region CDR H1 amino acid sequence
FNIKDYYMH

SEQ ID NO: 3492 - DNA, 27 bp, Artificial Sequence
  Description of Artificial Sequence: Synthetic Heavy chain variable region CDR H1 nucleic acid sequence
ttcaacatcaaggactactatatgcac

SEQ ID NO: 3493 - protein, 17 aa, Artificial Sequence
  Description of Artificial Sequence: Synthetic Heavy chain variable region CDR H2 amino acid sequence
WIDPENGNTIYDPKFQG

SEQ ID NO: 3494 - DNA, 51 bp, Artificial Sequence; identical to SEQ ID NO: 3414
  Description of Artificial Sequence: Synthetic Heavy chain variable region CDR H2 nucleic acid sequence

SEQ ID NO: 3495 - protein, 12 aa, Artificial Sequence
  Description of Artificial Sequence: Synthetic Heavy chain variable region CDR H3 amino acid sequence
ARDGYARYYFDY

SEQ ID NO: 3496 - DNA, 36 bp, Artificial Sequence; identical to SEQ ID NO: 3416
  Description of Artificial Sequence: Synthetic Heavy chain variable region CDR H3 nucleic acid sequence

SEQ ID NO: 3497 - DNA, 336 bp, Artificial Sequence
  Description of Artificial Sequence: Synthetic Light chain variable region nucleic acid sequence
gacatcgtgatgacccagtctccagactccctggctgtgtctctgggcgagagggccaccatcaactgcaagtccagccagagtcttttaaacagcagaaccagaaagaactacttagcttggtaccagcagaaaccaggacagcctcctaagctgctcatttactgggcatctacccgggaatccggggtccctgaccgattcagtggcagtgggtctgggacagatttcactctcaccatcagcagcctgcaggctgaagatgtggcagtttattactgtaagcagagttacaatttgagaactttcggcggagggaccaaggtggagatcaaa

SEQ ID NO: 3498 - protein, 112 aa, Artificial Sequence; identical to SEQ ID NO: 3082
  Description of Artificial Sequence: Synthetic Light chain variable region amino acid sequence

SEQ ID NO: 3499 - protein, 17 aa, Artificial Sequence
  Description of Artificial Sequence: Synthetic Light chain variable region CDR L1 amino acid sequence
KSSQSLLNSRTRKNYLA

SEQ ID NO: 3500 - DNA, 51 bp, Artificial Sequence; identical to SEQ ID NO: 2988
  Description of Artificial Sequence: Synthetic Light chain variable region CDR L1 nucleic acid sequence

SEQ ID NO: 3501 - protein, 7 aa, Artificial Sequence
  Description of Artificial Sequence: Synthetic Light chain variable region CDR L2 amino acid sequence
WASTRES

SEQ ID NO: 3502 - DNA, 21 bp, Artificial Sequence
  Description of Artificial Sequence: Synthetic Light chain variable region CDR L2 nucleic acid sequence
tgggcatctacccgggaatcc

SEQ ID NO: 3503 - protein, 8 aa, Artificial Sequence
  Description of Artificial Sequence: Synthetic Light chain variable region CDR L3 amino acid sequence
KQSYNLRT

SEQ ID NO: 3504 - DNA, 24 bp, Artificial Sequence
  Description of Artificial Sequence: Synthetic Light chain variable region CDR L3 nucleic acid sequence
aagcagagttacaatttgagaact

SEQ ID NO: 3505 - DNA, 357 bp, Artificial Sequence; identical to SEQ ID NO: 3425
  Description of Artificial Sequence: Synthetic Heavy chain variable region nucleic acid sequence

SEQ ID NO: 3506 - protein, 119 aa, Artificial Sequence; identical to SEQ ID NO: 3426
  Description of Artificial Sequence: Synthetic Heavy chain variable region amino acid sequence

SEQ ID NO: 3507 - protein, 9 aa, Artificial Sequence
  Description of Artificial Sequence: Synthetic Heavy chain variable region CDR H1 amino acid sequence
FNIKDYYMH

SEQ ID NO: 3508 - DNA, 27 bp, Artificial Sequence
  Description of Artificial Sequence: Synthetic Heavy chain variable region CDR H1 nucleic acid sequence
ttcaacatcaaggactactatatgcac

SEQ ID NO: 3509 - protein, 17 aa, Artificial Sequence
  Description of Artificial Sequence: Synthetic Heavy chain variable region CDR H2 amino acid sequence
WIDPENGNTIYDPKFQG

SEQ ID NO: 3510 - DNA, 51 bp, Artificial Sequence; identical to SEQ ID NO: 3414
  Description of Artificial Sequence: Synthetic Heavy chain variable region CDR H2 nucleic acid sequence

SEQ ID NO: 3511 - protein, 12 aa, Artificial Sequence
  Description of Artificial Sequence: Synthetic Heavy chain variable region CDR H3 amino acid sequence
ARDGYARYYFDY

SEQ ID NO: 3512 - DNA, 36 bp, Artificial Sequence; identical to SEQ ID NO: 3432
  Description of Artificial Sequence: Synthetic Heavy chain variable region CDR H3 nucleic acid sequence

SEQ ID NO: 3513 - DNA, 336 bp, Artificial Sequence; identical to SEQ ID NO: 3081
  Description of Artificial Sequence: Synthetic Light chain variable region nucleic acid sequence

SEQ ID NO: 3514 - protein, 112 aa, Artificial Sequence; identical to SEQ ID NO: 3082
  Description of Artificial Sequence: Synthetic Light chain variable region amino acid sequence

SEQ ID NO: 3515 - protein, 17 aa, Artificial Sequence
  Description of Artificial Sequence: Synthetic Light chain variable region CDR L1 amino acid sequence
KSSQSLLNSRTRKNYLA

SEQ ID NO: 3516 - DNA, 51 bp, Artificial Sequence; identical to SEQ ID NO: 2988
  Description of Artificial Sequence: Synthetic Light chain variable region CDR L1 nucleic acid sequence

SEQ ID NO: 3517 - protein, 7 aa, Artificial Sequence
  Description of Artificial Sequence: Synthetic Light chain variable region CDR L2 amino acid sequence
WASTRES

SEQ ID NO: 3518 - DNA, 21 bp, Artificial Sequence
  Description of Artificial Sequence: Synthetic Light chain variable region CDR L2 nucleic acid sequence
tgggcatctacccgggaatcc

SEQ ID NO: 3519 - protein, 8 aa, Artificial Sequence
  Description of Artificial Sequence: Synthetic Light chain variable region CDR L3 amino acid sequence
KQSYNLRT

SEQ ID NO: 3520 - DNA, 24 bp, Artificial Sequence
  Description of Artificial Sequence: Synthetic Light chain variable region CDR L3 nucleic acid sequence
aagcagagttacaatttgagaact

SEQ ID NO: 3521 - DNA, 357 bp, Artificial Sequence; identical to SEQ ID NO: 3441
  Description of Artificial Sequence: Synthetic Heavy chain variable region nucleic acid sequence

SEQ ID NO: 3522 - protein, 119 aa, Artificial Sequence; identical to SEQ ID NO: 3442
  Description of Artificial Sequence: Synthetic Heavy chain variable region amino acid sequence

SEQ ID NO: 3523 - protein, 9 aa, Artificial Sequence
  Description of Artificial Sequence: Synthetic Heavy chain variable region CDR H1 amino acid sequence
FNIKDYYMH

SEQ ID NO: 3524 - DNA, 27 bp, Artificial Sequence
  Description of Artificial Sequence: Synthetic Heavy chain variable region CDR H1 nucleic acid sequence
ttcaacatcaaggactactatatgcac

SEQ ID NO: 3525 - protein, 17 aa, Artificial Sequence
  Description of Artificial Sequence: Synthetic Heavy chain variable region CDR H2 amino acid sequence
WIDPENGNTIYDPKFQG

SEQ ID NO: 3526 - DNA, 51 bp, Artificial Sequence; identical to SEQ ID NO: 3414
  Description of Artificial Sequence: Synthetic Heavy chain variable region CDR H2 nucleic acid sequence

SEQ ID NO: 3527 - protein, 12 aa, Artificial Sequence
  Description of Artificial Sequence: Synthetic Heavy chain variable region CDR H3 amino acid sequence
ARDGYARYYFDY

SEQ ID NO: 3528 - DNA, 36 bp, Artificial Sequence; identical to SEQ ID NO: 3448
  Description of Artificial Sequence: Synthetic Heavy chain variable region CDR H3 nucleic acid sequence

SEQ ID NO: 3529 - DNA, 336 bp, Artificial Sequence; identical to SEQ ID NO: 3081
  Description of Artificial Sequence: Synthetic Light chain variable region nucleic acid sequence

SEQ ID NO: 3530 - protein, 112 aa, Artificial Sequence; identical to SEQ ID NO: 3082
  Description of Artificial Sequence: Synthetic Light chain variable region amino acid sequence

SEQ ID NO: 3531 - protein, 17 aa, Artificial Sequence
  Description of Artificial Sequence: Synthetic Light chain variable region CDR L1 amino acid sequence
KSSQSLLNSRTRKNYLA

SEQ ID NO: 3532 - DNA, 51 bp, Artificial Sequence; identical to SEQ ID NO: 2988
  Description of Artificial Sequence: Synthetic Light chain variable region CDR L1 nucleic acid sequence

SEQ ID NO: 3533 - protein, 7 aa, Artificial Sequence
  Description of Artificial Sequence: Synthetic Light chain variable region CDR L2 amino acid sequence
WASTRES

SEQ ID NO: 3534 - DNA, 21 bp, Artificial Sequence
  Description of Artificial Sequence: Synthetic Light chain variable region CDR L2 nucleic acid sequence
tgggcatctacccgggaatcc

SEQ ID NO: 3535 - protein, 8 aa, Artificial Sequence
  Description of Artificial Sequence: Synthetic Light chain variable region CDR L3 amino acid sequence
KQSYNLRT

SEQ ID NO: 3536 - DNA, 24 bp, Artificial Sequence
  Description of Artificial Sequence: Synthetic Light chain variable region CDR L3 nucleic acid sequence
aagcagagttacaatttgagaact

SEQ ID NO: 3537 - DNA, 357 bp, Artificial Sequence; identical to SEQ ID NO: 3377
  Description of Artificial Sequence: Synthetic Heavy chain variable region nucleic acid sequence

SEQ ID NO: 3538 - protein, 119 aa, Artificial Sequence; identical to SEQ ID NO: 3378
  Description of Artificial Sequence: Synthetic Heavy chain variable region amino acid sequence

SEQ ID NO: 3539 - protein, 9 aa, Artificial Sequence
  Description of Artificial Sequence: Synthetic Heavy chain variable region CDR H1 amino acid sequence
FNIKDYYMH

SEQ ID NO: 3540 - DNA, 27 bp, Artificial Sequence
  Description of Artificial Sequence: Synthetic Heavy chain variable region CDR H1 nucleic acid sequence
ttcaacatcaaggactactatatgcac

SEQ ID NO: 3541 - protein, 17 aa, Artificial Sequence
  Description of Artificial Sequence: Synthetic Heavy chain variable region CDR H2 amino acid sequence
WIDPENGNTIYDPKFQG

SEQ ID NO: 3542 - DNA, 51 bp, Artificial Sequence; identical to SEQ ID NO: 3366
  Description of Artificial Sequence: Synthetic Heavy chain variable region CDR H2 nucleic acid sequence

SEQ ID NO: 3543 - protein, 12 aa, Artificial Sequence
  Description of Artificial Sequence: Synthetic Heavy chain variable region CDR H3 amino acid sequence
ARDGYARYYFDY

SEQ ID NO: 3544 - DNA, 36 bp, Artificial Sequence; identical to SEQ ID NO: 3384
  Description of Artificial Sequence: Synthetic Heavy chain variable region CDR H3 nucleic acid sequence

SEQ ID NO: 3545 - DNA, 336 bp, Artificial Sequence; identical to SEQ ID NO: 3081
  Description of Artificial Sequence: Synthetic Light chain variable region nucleic acid sequence

SEQ ID NO: 3546 - protein, 112 aa, Artificial Sequence; identical to SEQ ID NO: 3082
  Description of Artificial Sequence: Synthetic Light chain variable region amino acid sequence

SEQ ID NO: 3547 - protein, 17 aa, Artificial Sequence
  Description of Artificial Sequence: Synthetic Light chain variable region CDR L1 amino acid sequence
KSSQSLLNSRTRKNYLA

SEQ ID NO: 3548 - DNA, 51 bp, Artificial Sequence; identical to SEQ ID NO: 2988
  Description of Artificial Sequence: Synthetic Light chain variable region CDR L1 nucleic acid sequence

SEQ ID NO: 3549 - protein, 7 aa, Artificial Sequence
  Description of Artificial Sequence: Synthetic Light chain variable region CDR L2 amino acid sequence
WASTRES

SEQ ID NO: 3550 - DNA, 21 bp, Artificial Sequence
  Description of Artificial Sequence: Synthetic Light chain variable region CDR L2 nucleic acid sequence
tgggcatctacccgggaatcc

SEQ ID NO: 3551 - protein, 8 aa, Artificial Sequence
  Description of Artificial Sequence: Synthetic Light chain variable region CDR L3 amino acid sequence
KQSYNLRT

SEQ ID NO: 3552 - DNA, 24 bp, Artificial Sequence
  Description of Artificial Sequence: Synthetic Light chain variable region CDR L3 nucleic acid sequence
aagcagagttacaatttgagaact

SEQ ID NO: 3553 - DNA, 360 bp, Artificial Sequence
  Description of Artificial Sequence: Synthetic Heavy chain variable region nucleic acid sequence
caggtccagcttgtacagtctggggctgaggtgaagaagcctggggcctcagtgaagatttcctgcaaggcttcgggataccccttcagttcctatcctatgcattgggtgcgccaggcccccggacaaaggcttgagtggatgggatggatcaacgttgacaatgagaacacaaaatattcatggaagttccggggcagagtcaccattaccagggacacatccgcgagcacagtttacatggagctgagcagtctgatatctgaagacacggctgtgtattactgtgggagagactgggacggggcgatccgtgtcttggactactggggccagggaaccctggtcaccgtctcctca

SEQ ID NO: 3554 - protein, 120 aa, Artificial Sequence
  Description of Artificial Sequence: Synthetic Heavy chain variable region amino acid sequence
QVQLVQSGAEVKKPGASVKISCKASGYPFSSYPMHWVRQAPGQRLEWMGWINVDNENTKYSWKFRGRVTITRDTSASTVYMELSSLISEDTAVYYCGRDWDGAIRVLDYWGQGTLVTVSS

SEQ ID NO: 3555 - protein, 9 aa, Artificial Sequence
  Description of Artificial Sequence: Synthetic Heavy chain variable region CDR H1 amino acid sequence
YPFSSYPMH

SEQ ID NO: 3556 - DNA, 27 bp, Artificial Sequence
  Description of Artificial Sequence: Synthetic Heavy chain variable region CDR H1 nucleic acid sequence
taccccttcagttcctatcctatgcat

SEQ ID NO: 3557 - protein, 17 aa, Artificial Sequence
  Description of Artificial Sequence: Synthetic Heavy chain variable region CDR H2 amino acid sequence
WINVDNENTKYSWKFRG

SEQ ID NO: 3558 - DNA, 51 bp, Artificial Sequence
  Description of Artificial Sequence: Synthetic Heavy chain variable region CDR H2 nucleic acid sequence
tggatcaacgttgacaatgagaacacaaaatattcatggaagttccggggc

SEQ ID NO: 3559 - protein, 13 aa, Artificial Sequence
  Description of Artificial Sequence: Synthetic Heavy chain variable region CDR H3 amino acid sequence
GRDWDGAIRVLDY

SEQ ID NO: 3560 - DNA, 39 bp, Artificial Sequence
  Description of Artificial Sequence: Synthetic Heavy chain variable region CDR H3 nucleic acid sequence
gggagagactgggacggggcgatccgtgtcttggactac

SEQ ID NO: 3561 - DNA, 339 bp, Artificial Sequence
  Description of Artificial Sequence: Synthetic Light chain variable region nucleic acid sequence
gatattgtgatgactcagactccagactccctggctgtgtctctgggcgagagggccaccatcacctgcaagtccagccagagtgttttattcagctccgacaataagaactacttagcttggtaccagcagaaaccgggacagcctcctaaattgctcatttactgggcatctatccgggaatccggggtccctgaccgattcggtggcagcgggtctgggacacatttcactctcaccatcaccagcgtgcaggctgcagatgtggcagtttattactgtcagcaatattatggtaatttccccaccttcggccaagggacacgactggagattaaa

SEQ ID NO: 3562 - protein, 113 aa, Artificial Sequence
  Description of Artificial Sequence: Synthetic Light chain variable region amino acid sequence
DIVMTQTPDSLAVSLGERATITCKSSQSVLFSSDNKNYLAWYQQKPGQPPKLLIYWASIRESGVPDRFGGSGSGTHFTLTITSVQAADVAVYYCQQYYGNFPTFGQGTRLEIK

SEQ ID NO: 3563 - protein, 17 aa, Artificial Sequence
  Description of Artificial Sequence: Synthetic Light chain variable region CDR L1 amino acid sequence
KSSQSVLFSSDNKNYLA

SEQ ID NO: 3564 - DNA, 51 bp, Artificial Sequence
  Description of Artificial Sequence: Synthetic Light chain variable region CDR L1 nucleic acid sequence
aagtccagccagagtgttttattcagctccgacaataagaactacttagct

SEQ ID NO: 3565 - protein, 7 aa, Artificial Sequence
  Description of Artificial Sequence: Synthetic Light chain variable region CDR L2 amino acid sequence
WASIRES

SEQ ID NO: 3566 - DNA, 21 bp, Artificial Sequence
  Description of Artificial Sequence: Synthetic Light chain variable region CDR L2 nucleic acid sequence
tgggcatctatccgggaatcc

SEQ ID NO: 3567 - protein, 9 aa, Artificial Sequence
  Description of Artificial Sequence: Synthetic Light chain variable region CDR L3 amino acid sequence
QQYYGNFPT

SEQ ID NO: 3568 - DNA, 27 bp, Artificial Sequence
  Description of Artificial Sequence: Synthetic Light chain variable region CDR L3 nucleic acid sequence
cagcaatattatggtaatttccccacc

SEQ ID NO: 3569 - DNA, 357 bp, Artificial Sequence
  Description of Artificial Sequence: Synthetic Heavy chain variable region nucleic acid sequence
caggtgcagctggtgcagtctggggctgaggtgaagaagcctggggcctcagtgaaggtctcctgcaaggcttctggattcaacatcaaggactactatatgcactgggtgcgacaggctcctggacaaaggcttgagtggatgggatggatcgaccttgaaaatggtaacacaatctatgacccgaagtttcagggcagggtcaccataaccagggacacgtccgccagcacagcctacatggagctgagcagcctgagatctgaagacacggcggtgtactactgcgcgagagatggatacgctagatattactttgactactggggccaaggaaccctggtcaccgtctcctca

SEQ ID NO: 3570 - protein, 119 aa, Artificial Sequence
  Description of Artificial Sequence: Synthetic Heavy chain variable region amino acid sequence
QVQLVQSGAEVKKPGASVKVSCKASGFNIKDYYMHWVRQAPGQRLEWMGWIDLENGNTIYDPKFQGRVTITRDTSASTAYMELSSLRSEDTAVYYCARDGYARYYFDYWGQGTLVTVSS

SEQ ID NO: 3571 - protein, 9 aa, Artificial Sequence
  Description of Artificial Sequence: Synthetic Heavy chain variable region CDR H1 amino acid sequence
FNIKDYYMH

SEQ ID NO: 3572 - DNA, 27 bp, Artificial Sequence
  Description of Artificial Sequence: Synthetic Heavy chain variable region CDR H1 nucleic acid sequence
ttcaacatcaaggactactatatgcac

SEQ ID NO: 3573 - protein, 17 aa, Artificial Sequence
  Description of Artificial Sequence: Synthetic Heavy chain variable region CDR H2 amino acid sequence
WIDLENGNTIYDPKFQG

SEQ ID NO: 3574 - DNA, 51 bp, Artificial Sequence
  Description of Artificial Sequence: Synthetic Heavy chain variable region CDR H2 nucleic acid sequence
tggatcgaccttgaaaatggtaacacaatctatgacccgaagtttcagggc

SEQ ID NO: 3575 - protein, 12 aa, Artificial Sequence
  Description of Artificial Sequence: Synthetic Heavy chain variable region CDR H3 amino acid sequence
ARDGYARYYFDY

SEQ ID NO: 3576 - DNA, 36 bp, Artificial Sequence; identical to SEQ ID NO: 3416
  Description of Artificial Sequence: Synthetic Heavy chain variable region CDR H3 nucleic acid sequence

SEQ ID NO: 3577 - DNA, 336 bp, Artificial Sequence
  Description of Artificial Sequence: Synthetic Light chain variable region nucleic acid sequence
gacatcgtgatgacccagtctccagactccctggctgtgtctctgggcgagagggccaccatcaactgcaagtccagccagagtcttttaaacagcagaaccagaaagaactacttagcttggtaccagcagaaaccaggacagcctcctaagctgctcatttactgggcatctacccgggaatccggggtccctgaccgattcagtggcagcgggtctgggacagatttcactctcaccatcagcagcctgcaggctgaagatgtggcagtttattactgtaagcaatcttattttcggagagctttcggcggagggaccaaggttgagatcaaa

SEQ ID NO: 3578 - protein, 112 aa, Artificial Sequence
  Description of Artificial Sequence: Synthetic Light chain variable region amino acid sequence
DIVMTQSPDSLAVSLGERATINCKSSQSLLNSRTRKNYLAWYQQKPGQPPKLLIYWASTRESGVPDRFSGSGSGTDFTLTISSLQAEDVAVYYCKQSYFRRAFGGGTKVEIK

SEQ ID NO: 3579 - protein, 17 aa, Artificial Sequence
  Description of Artificial Sequence: Synthetic Light chain variable region CDR L1 amino acid sequence
KSSQSLLNSRTRKNYLA

SEQ ID NO: 3580 - DNA, 51 bp, Artificial Sequence; identical to SEQ ID NO: 2988
  Description of Artificial Sequence: Synthetic Light chain variable region CDR L1 nucleic acid sequence

SEQ ID NO: 3581 - protein, 7 aa, Artificial Sequence
  Description of Artificial Sequence: Synthetic Light chain variable region CDR L2 amino acid sequence
WASTRES

SEQ ID NO: 3582 - DNA, 21 bp, Artificial Sequence
  Description of Artificial Sequence: Synthetic Light chain variable region CDR L2 nucleic acid sequence
tgggcatctacccgggaatcc

SEQ ID NO: 3583 - protein, 8 aa, Artificial Sequence
  Description of Artificial Sequence: Synthetic Light chain variable region CDR L3 amino acid sequence
KQSYFRRA

SEQ ID NO: 3584 - DNA, 24 bp, Artificial Sequence
  Description of Artificial Sequence: Synthetic Light chain variable region CDR L3 nucleic acid sequence
aagcaatcttattttcggagagct

SEQ ID NO: 3585 - DNA, 357 bp, Artificial Sequence
  Description of Artificial Sequence: Synthetic Heavy chain variable region nucleic acid sequence
caggtgcagctggtgcagtctggggctgaggtgaagaagcccggggcctcagtgaaggtctcctgcaaggcttctggattcaacaccaaggactactatatgcactgggtgcgacaggcccccgggcaaaggcttgagtggatgggatggatcggccctgaaaatggtaacacaatctatgacccgaagtttcagggcagggtcaccataaccagggacacgtccgccagcacagcctacatggagctgagcagcctgaggtctgaagacacggcggtgtactactgcgcgagggatggatacgctagatattactttgactactggggccaaggaaccctggtcaccgtctcctca

SEQ ID NO: 3586 - protein, 119 aa, Artificial Sequence
  Description of Artificial Sequence: Synthetic Heavy chain variable region amino acid sequence
QVQLVQSGAEVKKPGASVKVSCKASGFNTKDYYMHWVRQAPGQRLEWMGWIGPENGNTIYDPKFQGRVTITRDTSASTAYMELSSLRSEDTAVYYCARDGYARYYFDYWGQGTLVTVSS

SEQ ID NO: 3587 - protein, 9 aa, Artificial Sequence
  Description of Artificial Sequence: Synthetic Heavy chain variable region CDR H1 amino acid sequence
FNTKDYYMH

SEQ ID NO: 3588 - DNA, 27 bp, Artificial Sequence
  Description of Artificial Sequence: Synthetic Heavy chain variable region CDR H1 nucleic acid sequence
ttcaacaccaaggactactatatgcac

SEQ ID NO: 3589 - protein, 17 aa, Artificial Sequence
  Description of Artificial Sequence: Synthetic Heavy chain variable region CDR H2 amino acid sequence
WIGPENGNTIYDPKFQG

SEQ ID NO: 3590 - DNA, 51 bp, Artificial Sequence
  Description of Artificial Sequence: Synthetic Heavy chain variable region CDR H2 nucleic acid sequence
tggatcggccctgaaaatggtaacacaatctatgacccgaagtttcagggc

SEQ ID NO: 3591 - protein, 12 aa, Artificial Sequence
  Description of Artificial Sequence: Synthetic Heavy chain variable region CDR H3 amino acid sequence
ARDGYARYYFDY

SEQ ID NO: 3592 - DNA, 36 bp, Artificial Sequence
  Description of Artificial Sequence: Synthetic Heavy chain variable region CDR H3 nucleic acid sequence
gcgagggatggatacgctagatattactttgactac

SEQ ID NO: 3593 - DNA, 336 bp, Artificial Sequence
  Description of Artificial Sequence: Synthetic Light chain variable region nucleic acid sequence
gacatcgtaatgacccagtctccagactccctggctgtgtctctgggcgagagggccaccatcaactgcaggtccagccagagtcttttaaacagcagaaccagaaagaactacttagcttggtaccagcagaaaccaggacagcctcctaagctgctcatttactgggcatctacccgggaatccggggtccctgaccgattcagtggcagcgggtctgggacagatttcactctcaccatcagcagcctgcaggctgaagatgtggcagtttattactgtaagcaatcttattctcggagaactttcggcggagggaccaaggttgagatcaaa

SEQ ID NO: 3594 - protein, 112 aa, Artificial Sequence
  Description of Artificial Sequence: Synthetic Light chain variable region amino acid sequence
DIVMTQSPDSLAVSLGERATINCRSSQSLLNSRTRKNYLAWYQQKPGQPPKLLIYWASTRESGVPDRFSGSGSGTDFTLTISSLQAEDVAVYYCKQSYSRRTFGGGTKVEIK

SEQ ID NO: 3595 - protein, 17 aa, Artificial Sequence
  Description of Artificial Sequence: Synthetic Light chain variable region CDR L1 amino acid sequence
RSSQSLLNSRTRKNYLA

SEQ ID NO: 3596 - DNA, 51 bp, Artificial Sequence
  Description of Artificial Sequence: Synthetic Light chain variable region CDR L1 nucleic acid sequence
aggtccagccagagtcttttaaacagcagaaccagaaagaactacttagct

SEQ ID NO: 3597 - protein, 7 aa, Artificial Sequence
  Description of Artificial Sequence: Synthetic Light chain variable region CDR L2 amino acid sequence
WASTRES

SEQ ID NO: 3598 - DNA, 21 bp, Artificial Sequence
  Description of Artificial Sequence: Synthetic Light chain variable region CDR L2 nucleic acid sequence
tgggcatctacccgggaatcc

SEQ ID NO: 3599 - protein, 8 aa, Artificial Sequence
  Description of Artificial Sequence: Synthetic Light chain variable region CDR L3 amino acid sequence
KQSYSRRT

SEQ ID NO: 3600 - DNA, 24 bp, Artificial Sequence
  Description of Artificial Sequence: Synthetic Light chain variable region CDR L3 nucleic acid sequence
aagcaatcttattctcggagaact

SEQ ID NO: 3601 - DNA, 357 bp, Artificial Sequence
  Description of Artificial Sequence: Synthetic Heavy chain variable region nucleic acid sequence
caggtgcagctggtgcagtctggggctgaggtgaagaagcctggggcctcagtgaaggtctcctgcaaggcttctggattcaacatcaaggactactatatgcactgggtgcgacaggcccctggacaaaggcttgagtggatgggatggatcgaccttgaaaatggtaacacaatctatgacccgaaatttcagggcagggtcaccataaccagggacacgtccgccagcacagcctacatggagctgagcagcctgagatccgaagacacggcggtgtactactgcgcgagagatggatacgctagatattactttgactactggggccaaggaaccctggtcaccgtctcctca

SEQ ID NO: 3602 - protein, 119 aa, Artificial Sequence; identical to SEQ ID NO: 3570
  Description of Artificial Sequence: Synthetic Heavy chain variable region amino acid sequence

SEQ ID NO: 3603 - protein, 9 aa, Artificial Sequence
  Description of Artificial Sequence: Synthetic Heavy chain variable region CDR H1 amino acid sequence
FNIKDYYMH

SEQ ID NO: 3604 - DNA, 27 bp, Artificial Sequence
  Description of Artificial Sequence: Synthetic Heavy chain variable region CDR H1 nucleic acid sequence
ttcaacatcaaggactactatatgcac

SEQ ID NO: 3605 - protein, 17 aa, Artificial Sequence
  Description of Artificial Sequence: Synthetic Heavy chain variable region CDR H2 amino acid sequence
WIDLENGNTIYDPKFQG

SEQ ID NO: 3606 - DNA, 51 bp, Artificial Sequence
  Description of Artificial Sequence: Synthetic Heavy chain variable region CDR H2 nucleic acid sequence
tggatcgaccttgaaaatggtaacacaatctatgacccgaaatttcagggc

SEQ ID NO: 3607 - protein, 12 aa, Artificial Sequence
  Description of Artificial Sequence: Synthetic Heavy chain variable region CDR H3 amino acid sequence
ARDGYARYYFDY

SEQ ID NO: 3608 - DNA, 36 bp, Artificial Sequence; identical to SEQ ID NO: 3416
  Description of Artificial Sequence: Synthetic Heavy chain variable region CDR H3 nucleic acid sequence

SEQ ID NO: 3609 - DNA, 336 bp, Artificial Sequence
  Description of Artificial Sequence: Synthetic Light chain variable region nucleic acid sequence
gacatcgtgatgacccagtctccagactccctggctgtgtctctgggcgagagggccaccatcaactgcaagtccagccagagtcttttaaacggcagaaccagaaagaactacttagcttggtaccagcagaaaccaggacagcctcctaagctgctcatttactgggcatctacccgggaatccggggtccctgaccgattcagtggcagcgggactgggacagatttcactctcaccatcagcagcctgcaggctgaagatgtggcagtttattactgtaagcaatcttattctcggagaactttcggcggagggaccaaggttgagatcaaa

SEQ ID NO: 3610 - protein, 112 aa, Artificial Sequence
  Description of Artificial Sequence: Synthetic Light chain variable region amino acid sequence
DIVMTQSPDSLAVSLGERATINCKSSQSLLNGRTRKNYLAWYQQKPGQPPKLLIYWASTRESGVPDRFSGSGTGTDFTLTISSLQAEDVAVYYCKQSYSRRTFGGGTKVEIK

SEQ ID NO: 3611 - protein, 17 aa, Artificial Sequence
  Description of Artificial Sequence: Synthetic Light chain variable region CDR L1 amino acid sequence
KSSQSLLNGRTRKNYLA

SEQ ID NO: 3612 - DNA, 51 bp, Artificial Sequence
  Description of Artificial Sequence: Synthetic Light chain variable region CDR L1 nucleic acid sequence
aagtccagccagagtcttttaaacggcagaaccagaaagaactacttagct

SEQ ID NO: 3613 - protein, 7 aa, Artificial Sequence
  Description of Artificial Sequence: Synthetic Light chain variable region CDR L2 amino acid sequence
WASTRES

SEQ ID NO: 3614 - DNA, 21 bp, Artificial Sequence
  Description of Artificial Sequence: Synthetic Light chain variable region CDR L2 nucleic acid sequence
tgggcatctacccgggaatcc

SEQ ID NO: 3615 - protein, 8 aa, Artificial Sequence
  Description of Artificial Sequence: Synthetic Light chain variable region CDR L3 amino acid sequence
KQSYSRRT

SEQ ID NO: 3616 - DNA, 24 bp, Artificial Sequence
  Description of Artificial Sequence: Synthetic Light chain variable region CDR L3 nucleic acid sequence
aagcaatcttattctcggagaact

SEQ ID NO: 3617 - DNA, 357 bp, Artificial Sequence
  Description of Artificial Sequence: Synthetic Heavy chain variable region nucleic acid sequence
caggtgcagctggtgcagtctggggctgaggtgaagaagcctggggcctcagtgaaggtctcctgcaaggcttctggattcaacatcaaggactactatatgcactgggtgcgacaggctcctggacaagggcttgagtggatgggatggatcgaccttgaaaatggtaacacaatctatgacccgaagtttcagggcagggtcaccataaccagggacacgtccgccagcacagcctacatggagctgagcagcctgagatctgaagacacggcggtgtactactgcgcgagagatggatacgctagatattactttgactactggggccaaggaaccctggtcaccgtctcctca

SEQ ID NO: 3618 - protein, 119 aa, Artificial Sequence
  Description of Artificial Sequence: Synthetic Heavy chain variable region amino acid sequence
QVQLVQSGAEVKKPGASVKVSCKASGFNIKDYYMHWVRQAPGQGLEWMGWIDLENGNTIYDPKFQGRVTITRDTSASTAYMELSSLRSEDTAVYYCARDGYARYYFDYWGQGTLVTVSS

SEQ ID NO: 3619 - protein, 9 aa, Artificial Sequence
  Description of Artificial Sequence: Synthetic Heavy chain variable region CDR H1 amino acid sequence
FNIKDYYMH

SEQ ID NO: 3620 - DNA, 27 bp, Artificial Sequence
  Description of Artificial Sequence: Synthetic Heavy chain variable region CDR H1 nucleic acid sequence
ttcaacatcaaggactactatatgcac

SEQ ID NO: 3621 - protein, 17 aa, Artificial Sequence
  Description of Artificial Sequence: Synthetic Heavy chain variable region CDR H2 amino acid sequence
WIDLENGNTIYDPKFQG

SEQ ID NO: 3622 - DNA, 51 bp, Artificial Sequence; identical to SEQ ID NO: 3574
  Description of Artificial Sequence: Synthetic Heavy chain variable region CDR H2 nucleic acid sequence

SEQ ID NO: 3623 - protein, 12 aa, Artificial Sequence
  Description of Artificial Sequence: Synthetic Heavy chain variable region CDR H3 amino acid sequence
ARDGYARYYFDY

SEQ ID NO: 3624 - DNA, 36 bp, Artificial Sequence; identical to SEQ ID NO: 3416
  Description of Artificial Sequence: Synthetic Heavy chain variable region CDR H3 nucleic acid sequence

SEQ ID NO: 3625 - DNA, 336 bp, Artificial Sequence; identical to SEQ ID NO: 3577
  Description of Artificial Sequence: Synthetic Light chain variable region nucleic acid sequence

SEQ ID NO: 3626 - protein, 112 aa, Artificial Sequence; identical to SEQ ID NO: 3578
  Description of Artificial Sequence: Synthetic Light chain variable region amino acid sequence

SEQ ID NO: 3627 - protein, 17 aa, Artificial Sequence
  Description of Artificial Sequence: Synthetic Light chain variable region CDR L1 amino acid sequence
KSSQSLLNSRTRKNYLA

SEQ ID NO: 3628 - DNA, 51 bp, Artificial Sequence; identical to SEQ ID NO: 2988
  Description of Artificial Sequence: Synthetic Light chain variable region CDR L1 nucleic acid sequence

SEQ ID NO: 3629 - protein, 7 aa, Artificial Sequence
  Description of Artificial Sequence: Synthetic Light chain variable region CDR L2 amino acid sequence
WASTRES

SEQ ID NO: 3630 - DNA, 21 bp, Artificial Sequence
  Description of Artificial Sequence: Synthetic Light chain variable region CDR L2 nucleic acid sequence
tgggcatctacccgggaatcc

SEQ ID NO: 3631 - protein, 8 aa, Artificial Sequence
  Description of Artificial Sequence: Synthetic Light chain variable region CDR L3 amino acid sequence
KQSYFRRA

SEQ ID NO: 3632 - DNA, 24 bp, Artificial Sequence
  Description of Artificial Sequence: Synthetic Light chain variable region CDR L3 nucleic acid sequence
aagcaatcttattttcggagagct

SEQ ID NO: 3633 - DNA, 357 bp, Artificial Sequence
  Description of Artificial Sequence: Synthetic Heavy chain variable region nucleic acid sequence
caggtgcagctggtgcagtctggggctgaggtgaagaagcctggggcctcagtgaaggtctcctgcaaggcttctggattcaacatcaaggactactatatgcactgggtgcgacaggcccctggacaaaggcttgagtggatgggatggatcgaccttgaaaatggtaacacaatctatgacccgaagtttcagggcagggtcaccataaccagggacacgtccgccagcacagcctacatggagctgagcagcctgagatctgaagacacggcggtgtactactgcgcgagagatggatacgctagatattactttgactactggggccaaggaaccctggtcaccgtctcctca

SEQ ID NO: 3634 - protein, 119 aa, Artificial Sequence; identical to SEQ ID NO: 3570
  Description of Artificial Sequence: Synthetic Heavy chain variable region amino acid sequence

SEQ ID NO: 3635 - protein, 9 aa, Artificial Sequence
  Description of Artificial Sequence: Synthetic Heavy chain variable region CDR H1 amino acid sequence
FNIKDYYMH

SEQ ID NO: 3636 - DNA, 27 bp, Artificial Sequence
  Description of Artificial Sequence: Synthetic Heavy chain variable region CDR H1 nucleic acid sequence
ttcaacatcaaggactactatatgcac

SEQ ID NO: 3637 - protein, 17 aa, Artificial Sequence
  Description of Artificial Sequence: Synthetic Heavy chain variable region CDR H2 amino acid sequence
WIDLENGNTIYDPKFQG

SEQ ID NO: 3638 - DNA, 51 bp, Artificial Sequence; identical to SEQ ID NO: 3574
  Description of Artificial Sequence: Synthetic Heavy chain variable region CDR H2 nucleic acid sequence

SEQ ID NO: 3639 - protein, 12 aa, Artificial Sequence
  Description of Artificial Sequence: Synthetic Heavy chain variable region CDR H3 amino acid sequence
ARDGYARYYFDY

SEQ ID NO: 3640 - DNA, 36 bp, Artificial Sequence; identical to SEQ ID NO: 3416
  Description of Artificial Sequence: Synthetic Heavy chain variable region CDR H3 nucleic acid sequence

SEQ ID NO: 3641 - DNA, 336 bp, Artificial Sequence
  Description of Artificial Sequence: Synthetic Light chain variable region nucleic acid sequence
gacatcgtgatgacccagtctccagactccctggctgtgtctctgggcgagagggccaccatcaactgcaagtccagccagagtcttttaaacagcagaaccagaaagaactacttagcttggtaccagcagaaaccaggacagcctcctaagctgctcatttactgggcatctacccgggaatccggggtccctgaccgattcagtggcagcgggtctgggacagatttcactctcaccatcagcagcctgcaggctgaagatgtggcagtttattactgtaagcaatcttattctcggagaactttcggcggagggaccaaggttgagatcaaa

SEQ ID NO: 3642 - protein, 112 aa, Artificial Sequence
  Description of Artificial Sequence: Synthetic Light chain variable region amino acid sequence
DIVMTQSPDSLAVSLGERATINCKSSQSLLNSRTRKNYLAWYQQKPGQPPKLLIYWASTRESGVPDRFSGSGSGTDFTLTISSLQAEDVAVYYCKQSYSRRTFGGGTKVEIK

SEQ ID NO: 3643 - protein, 17 aa, Artificial Sequence
  Description of Artificial Sequence: Synthetic Light chain variable region CDR L1 amino acid sequence
KSSQSLLNSRTRKNYLA

SEQ ID NO: 3644 - DNA, 51 bp, Artificial Sequence; identical to SEQ ID NO: 2988
  Description of Artificial Sequence: Synthetic Light chain variable region CDR L1 nucleic acid sequence

SEQ ID NO: 3645 - protein, 7 aa, Artificial Sequence
  Description of Artificial Sequence: Synthetic Light chain variable region CDR L2 amino acid sequence
WASTRES

SEQ ID NO: 3646 - DNA, 21 bp, Artificial Sequence
  Description of Artificial Sequence: Synthetic Light chain variable region CDR L2 nucleic acid sequence
tgggcatctacccgggaatcc

SEQ ID NO: 3647 - protein, 8 aa, Artificial Sequence
  Description of Artificial Sequence: Synthetic Light chain variable region CDR L3 amino acid sequence
KQSYSRRT

SEQ ID NO: 3648 - DNA, 24 bp, Artificial Sequence
  Description of Artificial Sequence: Synthetic Light chain variable region CDR L3 nucleic acid sequence
aagcaatcttattctcggagaact

SEQ ID NO: 3649 - DNA, 357 bp, Artificial Sequence
  Description of Artificial Sequence: Synthetic Heavy chain variable region nucleic acid sequence
caggtgcagctggtgcagtctggggctgaggtgaagaagcctggggcctcagtgaaggtctcctgcaaggcttctggattcaacatcaaggactactatatgcactgggtgcgacaggcccctggacaaaggcttgagtggatgggatggatcgaccttgaaaatggtaacacaatctatgacccgaaatttcagggcagggtcaccataaccagggacacgtccgccagcacagcctacatggagctgagcagcctgagatctgaagacacggcggtgtactactgcgcgagagatggatacgctagatattactttgactactggggccaaggaaccctggtcaccgtctcctca

SEQ ID NO: 3650 - protein, 119 aa, Artificial Sequence; identical to SEQ ID NO: 3570
  Description of Artificial Sequence: Synthetic Heavy chain variable region amino acid sequence

SEQ ID NO: 3651 - protein, 9 aa, Artificial Sequence
  Description of Artificial Sequence: Synthetic Heavy chain variable region CDR H1 amino acid sequence
FNIKDYYMH

SEQ ID NO: 3652 - DNA, 27 bp, Artificial Sequence
  Description of Artificial Sequence: Synthetic Heavy chain variable region CDR H1 nucleic acid sequence
ttcaacatcaaggactactatatgcac

SEQ ID NO: 3653 - protein, 17 aa, Artificial Sequence
  Description of Artificial Sequence: Synthetic Heavy chain variable region CDR H2 amino acid sequence
WIDLENGNTIYDPKFQG

SEQ ID NO: 3654 - DNA, 51 bp, Artificial Sequence; identical to SEQ ID NO: 3606
  Description of Artificial Sequence: Synthetic Heavy chain variable region CDR H2 nucleic acid sequence

SEQ ID NO: 3655 - protein, 12 aa, Artificial Sequence
  Description of Artificial Sequence: Synthetic Heavy chain variable region CDR H3 amino acid sequence
ARDGYARYYFDY

SEQ ID NO: 3656 - DNA, 36 bp, Artificial Sequence; identical to SEQ ID NO: 3416
  Description of Artificial Sequence: Synthetic Heavy chain variable region CDR H3 nucleic acid sequence

SEQ ID NO: 3657 - DNA, 336 bp, Artificial Sequence
  Description of Artificial Sequence: Synthetic Light chain variable region nucleic acid sequence
gacatcgtgatgacccagtctccagactccctggctgtgtctctgggcgggagggccaccatcaactgcaagtccagccagagtcttttaaacagcagaaccagaaagaactacttagcttggtaccagcagaaaccaggacagcctcctaagctgctcatttactgggcatctacccgggaatccggggtccctgaccgattcagtggcagcgggtctgggacagacttcactctcactatcagtagcctgcaggctgaagatgtggcagtttattactgtaagcaatcttattctcggagaactttcggcggagggaccaaggtcgagatcaaa

SEQ ID NO: 3658 - protein, 112 aa, Artificial Sequence
  Description of Artificial Sequence: Synthetic Light chain variable region amino acid sequence
DIVMTQSPDSLAVSLGGRATINCKSSQSLLNSRTRKNYLAWYQQKPGQPPKLLIYWASTRESGVPDRFSGSGSGTDFTLTISSLQAEDVAVYYCKQSYSRRTFGGGTKVEIK

SEQ ID NO: 3659 - protein, 17 aa, Artificial Sequence
  Description of Artificial Sequence: Synthetic Light chain variable region CDR L1 amino acid sequence
KSSQSLLNSRTRKNYLA

SEQ ID NO: 3660 - DNA, 51 bp, Artificial Sequence; identical to SEQ ID NO: 2988
  Description of Artificial Sequence: Synthetic Light chain variable region CDR L1 nucleic acid sequence

SEQ ID NO: 3661 - protein, 7 aa, Artificial Sequence
  Description of Artificial Sequence: Synthetic Light chain variable region CDR L2 amino acid sequence
WASTRES

SEQ ID NO: 3662 - DNA, 21 bp, Artificial Sequence
  Description of Artificial Sequence: Synthetic Light chain variable region CDR L2 nucleic acid sequence
tgggcatctacccgggaatcc

SEQ ID NO: 3663 - protein, 8 aa, Artificial Sequence
  Description of Artificial Sequence: Synthetic Light chain variable region CDR L3 amino acid sequence
KQSYSRRT

SEQ ID NO: 3664 - DNA, 24 bp, Artificial Sequence
  Description of Artificial Sequence: Synthetic Light chain variable region CDR L3 nucleic acid sequence
aagcaatcttattctcggagaact

SEQ ID NO: 3665 - DNA, 357 bp, Artificial Sequence; identical to SEQ ID NO: 3585
  Description of Artificial Sequence: Synthetic Heavy chain variable region nucleic acid sequence

SEQ ID NO: 3666 - protein, 119 aa, Artificial Sequence; identical to SEQ ID NO: 3586
  Description of Artificial Sequence: Synthetic Heavy chain variable region amino acid sequence

SEQ ID NO: 3667 - protein, 9 aa, Artificial Sequence
  Description of Artificial Sequence: Synthetic Heavy chain variable region CDR H1 amino acid sequence
FNTKDYYMH

SEQ ID NO: 3668 - DNA, 27 bp, Artificial Sequence
  Description of Artificial Sequence: Synthetic Heavy chain variable region CDR H1 nucleic acid sequence
ttcaacaccaaggactactatatgcac

SEQ ID NO: 3669 - protein, 17 aa, Artificial Sequence
  Description of Artificial Sequence: Synthetic Heavy chain variable region CDR H2 amino acid sequence
WIGPENGNTIYDPKFQG

SEQ ID NO: 3670 - DNA, 51 bp, Artificial Sequence; identical to SEQ ID NO: 3590
  Description of Artificial Sequence: Synthetic Heavy chain variable region CDR H2 nucleic acid sequence

SEQ ID NO: 3671 - protein, 12 aa, Artificial Sequence
  Description of Artificial Sequence: Synthetic Heavy chain variable region CDR H3 amino acid sequence
ARDGYARYYFDY

SEQ ID NO: 3672 - DNA, 36 bp, Artificial Sequence; identical to SEQ ID NO: 3592
  Description of Artificial Sequence: Synthetic Heavy chain variable region CDR H3 nucleic acid sequence

SEQ ID NO: 3673 - DNA, 336 bp, Artificial Sequence
  Description of Artificial Sequence: Synthetic Light chain variable region nucleic acid sequence
gacatcgtgatgacccagtctccagactccctggctgtgcctctgggcgagagggccaccatcaactgcaagtccagccagagccttttaaacagcagaaccagaaagaactacttagcttggtaccagcagaaaccaggacagcctcctaagctgctcatttactgggcatctacccgggaatccggggtccctgaccgattcagtggcagcgggtctgggacagatttcactctcaccatcagcagcctgcaggctgaagatgtggcagtttattactgtaagcaatcttattctcggagaactttcggcggagggaccaaggttgagatcaaa

SEQ ID NO: 3674 - protein, 112 aa, Artificial Sequence
  Description of Artificial Sequence: Synthetic Light chain variable region amino acid sequence
DIVMTQSPDSLAVPLGERATINCKSSQSLLNSRTRKNYLAWYQQKPGQPPKLLIYWASTRESGVPDRFSGSGSGTDFTLTISSLQAEDVAVYYCKQSYSRRTFGGGTKVEIK

SEQ ID NO: 3675 - protein, 17 aa, Artificial Sequence
  Description of Artificial Sequence: Synthetic Light chain variable region CDR L1 amino acid sequence
KSSQSLLNSRTRKNYLA

SEQ ID NO: 3676 - DNA, 51 bp, Artificial Sequence
  Description of Artificial Sequence: Synthetic Light chain variable region CDR L1 nucleic acid sequence
aagtccagccagagccttttaaacagcagaaccagaaagaactacttagct

SEQ ID NO: 3677 - protein, 7 aa, Artificial Sequence
  Description of Artificial Sequence: Synthetic Light chain variable region CDR L2 amino acid sequence
WASTRES

SEQ ID NO: 3678 - DNA, 21 bp, Artificial Sequence
  Description of Artificial Sequence: Synthetic Light chain variable region CDR L2 nucleic acid sequence
tgggcatctacccgggaatcc

SEQ ID NO: 3679 - protein, 8 aa, Artificial Sequence
  Description of Artificial Sequence: Synthetic Light chain variable region CDR L3 amino acid sequence
KQSYSRRT

SEQ ID NO: 3680 - DNA, 24 bp, Artificial Sequence
  Description of Artificial Sequence: Synthetic Light chain variable region CDR L3 nucleic acid sequence
aagcaatcttattctcggagaact

SEQ ID NO: 3681 - DNA, 357 bp, Artificial Sequence
  Description of Artificial Sequence: Synthetic Heavy chain variable region nucleic acid sequence
caggtgcagctggtgcagtctggggctgaggtgaagaagcctggggcctcagtgaaggtttcctgcaaggcttctggattcaacatcaaggactactatatgcactgggtgcgacaggcccctggacaaaggcttgagtggatgggatggatcgaccttgaaaatggtaacacaatctatgacccgaaatttcagggcagggtcaccataaccagggacacgtccgccagcacagcctacatggagctgagcagcctgagatctgaagacacggcggtgtactactgcgcgagagatggatacgctagatattactttgactactggggccaaggaaccctggtcaccgtctcctca

SEQ ID NO: 3682 - protein, 119 aa, Artificial Sequence; identical to SEQ ID NO: 3570
  Description of Artificial Sequence: Synthetic Heavy chain variable region amino acid sequence

SEQ ID NO: 3683 - protein, 9 aa, Artificial Sequence
  Description of Artificial Sequence: Synthetic Heavy chain variable region CDR H1 amino acid sequence
FNIKDYYMH

SEQ ID NO: 3684 - DNA, 27 bp, Artificial Sequence
  Description of Artificial Sequence: Synthetic Heavy chain variable region CDR H1 nucleic acid sequence
ttcaacatcaaggactactatatgcac

SEQ ID NO: 3685 - protein, 17 aa, Artificial Sequence
  Description of Artificial Sequence: Synthetic Heavy chain variable region CDR H2 amino acid sequence
WIDLENGNTIYDPKFQG

SEQ ID NO: 3686 - DNA, 51 bp, Artificial Sequence; identical to SEQ ID NO: 3606
  Description of Artificial Sequence: Synthetic Heavy chain variable region CDR H2 nucleic acid sequence

SEQ ID NO: 3687 - protein, 12 aa, Artificial Sequence
  Description of Artificial Sequence: Synthetic Heavy chain variable region CDR H3 amino acid sequence
ARDGYARYYFDY

SEQ ID NO: 3688 - DNA, 36 bp, Artificial Sequence; identical to SEQ ID NO: 3416
  Description of Artificial Sequence: Synthetic Heavy chain variable region CDR H3 nucleic acid sequence

SEQ ID NO: 3689 - DNA, 336 bp, Artificial Sequence
  Description of Artificial Sequence: Synthetic Light chain variable region nucleic acid sequence
gacatcgtaatgacccagtctccagactccctggctgtgtctctgggcgagagggccaccatcaactgcaggtccagccagagtcttttaaacagcagaaccagaaagaactacttagcttggtaccagcagaaaccaggacagcctcctaagctgctcatttactgggcatctatccgggaatccggggtccctgaccgattcagtggcagcgggtctgggacagatttcactctcaccatcagcagcctgcaggctgaagatgtggcagtttattactgtaagcaatcttattctcggagaactttcggcggagggaccaaggttgagatcaaa

SEQ ID NO: 3690 - protein, 112 aa, Artificial Sequence
  Description of Artificial Sequence: Synthetic Light chain variable region amino acid sequence
DIVMTQSPDSLAVSLGERATINCRSSQSLLNSRTRKNYLAWYQQKPGQPPKLLIYWASIRESGVPDRFSGSGSGTDFTLTISSLQAEDVAVYYCKQSYSRRTFGGGTKVEIK

SEQ ID NO: 3691 - protein, 17 aa, Artificial Sequence
  Description of Artificial Sequence: Synthetic Light chain variable region CDR L1 amino acid sequence
RSSQSLLNSRTRKNYLA

SEQ ID NO: 3692 - DNA, 51 bp, Artificial Sequence; identical to SEQ ID NO: 3596
  Description of Artificial Sequence: Synthetic Light chain variable region CDR L1 nucleic acid sequence

SEQ ID NO: 3693 - protein, 7 aa, Artificial Sequence
  Description of Artificial Sequence: Synthetic Light chain variable region CDR L2 amino acid sequence
WASIRES

SEQ ID NO: 3694 - DNA, 21 bp, Artificial Sequence
  Description of Artificial Sequence: Synthetic Light chain variable region CDR L2 nucleic acid sequence
tgggcatctatccgggaatcc

SEQ ID NO: 3695 - protein, 8 aa, Artificial Sequence
  Description of Artificial Sequence: Synthetic Light chain variable region CDR L3 amino acid sequence
KQSYSRRT

SEQ ID NO: 3696 - DNA, 24 bp, Artificial Sequence
  Description of Artificial Sequence: Synthetic Light chain variable region CDR L3 nucleic acid sequence
aagcaatcttattctcggagaact

SEQ ID NO: 3697 - DNA, 357 bp, Artificial Sequence; identical to SEQ ID NO: 3569
  Description of Artificial Sequence: Synthetic Heavy chain variable region nucleic acid sequence

SEQ ID NO: 3698 - protein, 119 aa, Artificial Sequence; identical to SEQ ID NO: 3570
  Description of Artificial Sequence: Synthetic Heavy chain variable region amino acid sequence

SEQ ID NO: 3699 - protein, 9 aa, Artificial Sequence
  Description of Artificial Sequence: Synthetic Heavy chain variable region CDR H1 amino acid sequence
FNIKDYYMH

SEQ ID NO: 3700 - DNA, 27 bp, Artificial Sequence
  Description of Artificial Sequence: Synthetic Heavy chain variable region CDR H1 nucleic acid sequence
ttcaacatcaaggactactatatgcac

SEQ ID NO: 3701 - protein, 17 aa, Artificial Sequence
  Description of Artificial Sequence: Synthetic Heavy chain variable region CDR H2 amino acid sequence
WIDLENGNTIYDPKFQG

SEQ ID NO: 3702 - DNA, 51 bp, Artificial Sequence; identical to SEQ ID NO: 3574
  Description of Artificial Sequence: Synthetic Heavy chain variable region CDR H2 nucleic acid sequence

SEQ ID NO: 3703 - protein, 12 aa, Artificial Sequence
  Description of Artificial Sequence: Synthetic Heavy chain variable region CDR H3 amino acid sequence
ARDGYARYYFDY

SEQ ID NO: 3704 - DNA, 36 bp, Artificial Sequence; identical to SEQ ID NO: 3416
  Description of Artificial Sequence: Synthetic Heavy chain variable region CDR H3 nucleic acid sequence

SEQ ID NO: 3705 - DNA, 336 bp, Artificial Sequence; identical to SEQ ID NO: 3577
  Description of Artificial Sequence: Synthetic Light chain variable region nucleic acid sequence

SEQ ID NO: 3706 - protein, 112 aa, Artificial Sequence; identical to SEQ ID NO: 3578
  Description of Artificial Sequence: Synthetic Light chain variable region amino acid sequence

SEQ ID NO: 3707 - protein, 17 aa, Artificial Sequence
  Description of Artificial Sequence: Synthetic Light chain variable region CDR L1 amino acid sequence
KSSQSLLNSRTRKNYLA

SEQ ID NO: 3708 - DNA, 51 bp, Artificial Sequence; identical to SEQ ID NO: 2988
  Description of Artificial Sequence: Synthetic Light chain variable region CDR L1 nucleic acid sequence

SEQ ID NO: 3709 - protein, 7 aa, Artificial Sequence
  Description of Artificial Sequence: Synthetic Light chain variable region CDR L2 amino acid sequence
WASTRES

SEQ ID NO: 3710 - DNA, 21 bp, Artificial Sequence
  Description of Artificial Sequence: Synthetic Light chain variable region CDR L2 nucleic acid sequence
tgggcatctacccgggaatcc

SEQ ID NO: 3711 - protein, 8 aa, Artificial Sequence
  Description of Artificial Sequence: Synthetic Light chain variable region CDR L3 amino acid sequence
KQSYFRRA

SEQ ID NO: 3712 - DNA, 24 bp, Artificial Sequence
  Description of Artificial Sequence: Synthetic Light chain variable region CDR L3 nucleic acid sequence
aagcaatcttattttcggagagct

SEQ ID NO: 3713 - DNA, 357 bp, Artificial Sequence; identical to SEQ ID NO: 3649
  Description of Artificial Sequence: Synthetic Heavy chain variable region nucleic acid sequence

SEQ ID NO: 3714 - protein, 119 aa, Artificial Sequence; identical to SEQ ID NO: 3570
  Description of Artificial Sequence: Synthetic Heavy chain variable region amino acid sequence

SEQ ID NO: 3715 - protein, 9 aa, Artificial Sequence
  Description of Artificial Sequence: Synthetic Heavy chain variable region CDR H1 amino acid sequence
FNIKDYYMH

SEQ ID NO: 3716 - DNA, 27 bp, Artificial Sequence
  Description of Artificial Sequence: Synthetic Heavy chain variable region CDR H1 nucleic acid sequence
ttcaacatcaaggactactatatgcac

SEQ ID NO: 3717 - protein, 17 aa, Artificial Sequence
  Description of Artificial Sequence: Synthetic Heavy chain variable region CDR H2 amino acid sequence
WIDLENGNTIYDPKFQG

SEQ ID NO: 3718 - DNA, 51 bp, Artificial Sequence; identical to SEQ ID NO: 3606
  Description of Artificial Sequence: Synthetic Heavy chain variable region CDR H2 nucleic acid sequence

SEQ ID NO: 3719 - protein, 12 aa, Artificial Sequence
  Description of Artificial Sequence: Synthetic Heavy chain variable region CDR H3 amino acid sequence
ARDGYARYYFDY

SEQ ID NO: 3720 - DNA, 36 bp, Artificial Sequence; identical to SEQ ID NO: 3416
  Description of Artificial Sequence: Synthetic Heavy chain variable region CDR H3 nucleic acid sequence

SEQ ID NO: 3721 - DNA, 336 bp, Artificial Sequence; identical to SEQ ID NO: 3593
  Description of Artificial Sequence: Synthetic Light chain variable region nucleic acid sequence

SEQ ID NO: 3722 - protein, 112 aa, Artificial Sequence; identical to SEQ ID NO: 3594
  Description of Artificial Sequence: Synthetic Light chain variable region amino acid sequence

SEQ ID NO: 3723 - protein, 17 aa, Artificial Sequence
  Description of Artificial Sequence: Synthetic Light chain variable region CDR L1 amino acid sequence
RSSQSLLNSRTRKNYLA

SEQ ID NO: 3724 - DNA, 51 bp, Artificial Sequence; identical to SEQ ID NO: 3596
  Description of Artificial Sequence: Synthetic Light chain variable region CDR L1 nucleic acid sequence

SEQ ID NO: 3725 - protein, 7 aa, Artificial Sequence
  Description of Artificial Sequence: Synthetic Light chain variable region CDR L2 amino acid sequence
WASTRES

SEQ ID NO: 3726 - DNA, 21 bp, Artificial Sequence
  Description of Artificial Sequence: Synthetic Light chain variable region CDR L2 nucleic acid sequence
tgggcatctacccgggaatcc

SEQ ID NO: 3727 - protein, 8 aa, Artificial Sequence
  Description of Artificial Sequence: Synthetic Light chain variable region CDR L3 amino acid sequence
KQSYSRRT

SEQ ID NO: 3728 - DNA, 24 bp, Artificial Sequence
  Description of Artificial Sequence: Synthetic Light chain variable region CDR L3 nucleic acid sequence
aagcaatcttattctcggagaact

SEQ ID NO: 3729 - DNA, 357 bp, Artificial Sequence; identical to SEQ ID NO: 3569
  Description of Artificial Sequence: Synthetic Heavy chain variable region nucleic acid sequence

SEQ ID NO: 3730 - protein, 119 aa, Artificial Sequence; identical to SEQ ID NO: 3570
  Description of Artificial Sequence: Synthetic Heavy chain variable region amino acid sequence

SEQ ID NO: 3731 - protein, 9 aa, Artificial Sequence
  Description of Artificial Sequence: Synthetic Heavy chain variable region CDR H1 amino acid sequence
FNIKDYYMH

SEQ ID NO: 3732 - DNA, 27 bp, Artificial Sequence
  Description of Artificial Sequence: Synthetic Heavy chain variable region CDR H1 nucleic acid sequence
ttcaacatcaaggactactatatgcac

SEQ ID NO: 3733 - protein, 17 aa, Artificial Sequence
  Description of Artificial Sequence: Synthetic Heavy chain variable region CDR H2 amino acid sequence
WIDLENGNTIYDPKFQG

SEQ ID NO: 3734 - DNA, 51 bp, Artificial Sequence; identical to SEQ ID NO: 3574
  Description of Artificial Sequence: Synthetic Heavy chain variable region CDR H2 nucleic acid sequence

SEQ ID NO: 3735 - protein, 12 aa, Artificial Sequence
  Description of Artificial Sequence: Synthetic Heavy chain variable region CDR H3 amino acid sequence
ARDGYARYYFDY

SEQ ID NO: 3736 - DNA, 36 bp, Artificial Sequence; identical to SEQ ID NO: 3416
  Description of Artificial Sequence: Synthetic Heavy chain variable region CDR H3 nucleic acid sequence

SEQ ID NO: 3737 - DNA, 336 bp, Artificial Sequence
  Description of Artificial Sequence: Synthetic Light chain variable region nucleic acid sequence
ggcatcgtgatgacccagtctccagactccctggctgtgtctctgggcgagagggccaccatcaactgcaagtccagccagagtcttttaaacagcagaaccagaaagaactacttagcttggtaccagcagaaaccaggacagcctcctaagctgctcatttactgggcatctacccgggaatccggggtccctgaccgattcagtggcagcgggtctgggacagatttcactctcaccatcagcagcctgcaggctgaagatgtggcagtttattactgtaagcaatcttattctcggagaactttcggcggagggaccaaggtcgagatcaaa

SEQ ID NO: 3738 - protein, 112 aa, Artificial Sequence
  Description of Artificial Sequence: Synthetic Light chain variable region amino acid sequence
GIVMTQSPDSLAVSLGERATINCKSSQSLLNSRTRKNYLAWYQQKPGQPPKLLIYWASTRESGVPDRFSGSGSGTDFTLTISSLQAEDVAVYYCKQSYSRRTFGGGTKVEIK

SEQ ID NO: 3739 - protein, 17 aa, Artificial Sequence
  Description of Artificial Sequence: Synthetic Light chain variable region CDR L1 amino acid sequence
KSSQSLLNSRTRKNYLA

SEQ ID NO: 3740 - DNA, 51 bp, Artificial Sequence; identical to SEQ ID NO: 2988
  Description of Artificial Sequence: Synthetic Light chain variable region CDR L1 nucleic acid sequence

SEQ ID NO: 3741 - protein, 7 aa, Artificial Sequence
  Description of Artificial Sequence: Synthetic Light chain variable region CDR L2 amino acid sequence
WASTRES

SEQ ID NO: 3742 - DNA, 21 bp, Artificial Sequence
  Description of Artificial Sequence: Synthetic Light chain variable region CDR L2 nucleic acid sequence
tgggcatctacccgggaatcc

SEQ ID NO: 3743 - protein, 8 aa, Artificial Sequence
  Description of Artificial Sequence: Synthetic Light chain variable region CDR L3 amino acid sequence
KQSYSRRT

SEQ ID NO: 3744 - DNA, 24 bp, Artificial Sequence
  Description of Artificial Sequence: Synthetic Light chain variable region CDR L3 nucleic acid sequence
aagcaatcttattctcggagaact

SEQ ID NO: 3745 - DNA, 357 bp, Artificial Sequence; identical to SEQ ID NO: 3649
  Description of Artificial Sequence: Synthetic Heavy chain variable region nucleic acid sequence

SEQ ID NO: 3746 - protein, 119 aa, Artificial Sequence; identical to SEQ ID NO: 3570
  Description of Artificial Sequence: Synthetic Heavy chain variable region amino acid sequence

SEQ ID NO: 3747 - protein, 9 aa, Artificial Sequence
  Description of Artificial Sequence: Synthetic Heavy chain variable region CDR H1 amino acid sequence
FNIKDYYMH

SEQ ID NO: 3748 - DNA, 27 bp, Artificial Sequence
  Description of Artificial Sequence: Synthetic Heavy chain variable region CDR H1 nucleic acid sequence
ttcaacatcaaggactactatatgcac

SEQ ID NO: 3749 - protein, 17 aa, Artificial Sequence
  Description of Artificial Sequence: Synthetic Heavy chain variable region CDR H2 amino acid sequence
WIDLENGNTIYDPKFQG

SEQ ID NO: 3750 - DNA, 51 bp, Artificial Sequence; identical to SEQ ID NO: 3606
  Description of Artificial Sequence: Synthetic Heavy chain variable region CDR H2 nucleic acid sequence

SEQ ID NO: 3751 - protein, 12 aa, Artificial Sequence
  Description of Artificial Sequence: Synthetic Heavy chain variable region CDR H3 amino acid sequence
ARDGYARYYFDY

SEQ ID NO: 3752 - DNA, 36 bp, Artificial Sequence; identical to SEQ ID NO: 3416
  Description of Artificial Sequence: Synthetic Heavy chain variable region CDR H3 nucleic acid sequence

SEQ ID NO: 3753 - DNA, 336 bp, Artificial Sequence
  Description of Artificial Sequence: Synthetic Light chain variable region nucleic acid sequence
gacatcgtgatgacccagtctccagactccctggctgtgtctctgggcgagagggccaccatcaactgcaagtccagccagagtcttttaaacggcagaaccagaaagaactacttagcttggtaccagcagaaaccaggacagcctcctaagctgctcatttactgggcatctacccgggaatccggggtccctgaccgattcagtggcagcgggtctgggacagatttcactctcaccatcagcagcctgcaggctgaagatgtggcagtttattactgtaagcaatcttattctcggagaactttcggcggagggaccaaggttgagatcaaa

SEQ ID NO: 3754 - protein, 112 aa, Artificial Sequence
  Description of Artificial Sequence: Synthetic Light chain variable region amino acid sequence
DIVMTQSPDSLAVSLGERATINCKSSQSLLNGRTRKNYLAWYQQKPGQPPKLLIYWASTRESGVPDRFSGSGSGTDFTLTISSLQAEDVAVYYCKQSYSRRTFGGGTKVEIK

SEQ ID NO: 3755 - protein, 17 aa, Artificial Sequence
  Description of Artificial Sequence: Synthetic Light chain variable region CDR L1 amino acid sequence
KSSQSLLNGRTRKNYLA

SEQ ID NO: 3756 - DNA, 51 bp, Artificial Sequence; identical to SEQ ID NO: 3612
  Description of Artificial Sequence: Synthetic Light chain variable region CDR L1 nucleic acid sequence

SEQ ID NO: 3757 - protein, 7 aa, Artificial Sequence
  Description of Artificial Sequence: Synthetic Light chain variable region CDR L2 amino acid sequence
WASTRES

SEQ ID NO: 3758 - DNA, 21 bp, Artificial Sequence
  Description of Artificial Sequence: Synthetic Light chain variable region CDR L2 nucleic acid sequence
tgggcatctacccgggaatcc

SEQ ID NO: 3759 - protein, 8 aa, Artificial Sequence
  Description of Artificial Sequence: Synthetic Light chain variable region CDR L3 amino acid sequence
KQSYSRRT

SEQ ID NO: 3760 - DNA, 24 bp, Artificial Sequence
  Description of Artificial Sequence: Synthetic Light chain variable region CDR L3 nucleic acid sequence
aagcaatcttattctcggagaact

SEQ ID NO: 3761 - DNA, 357 bp, Artificial Sequence
  Description of Artificial Sequence: Synthetic Heavy chain variable region nucleic acid sequence
caggtgcagctggtgcagtctggggctgaggtgaagaagcctggggcctcagtgaaggtctcctgcaaggcttctggattcaacatcaaggactactatatgcactgggtgcgacaggcccctggacaaaggcttgagtggatgggatggatcgaccttgacaatggtaacacaatctatgacccgaaatttcagggcagggtcaccataaccagggacacgtccgccagcacagcctacatggagctgagcagcctgagatctgaagacacggcggtgtactactgcgcgagagatggatacgctagatattactttgactactggggccaaggaaccctggtcaccgtctcctca

SEQ ID NO: 3762 - protein, 119 aa, Artificial Sequence
  Description of Artificial Sequence: Synthetic Heavy chain variable region amino acid sequence
QVQLVQSGAEVKKPGASVKVSCKASGFNIKDYYMHWVRQAPGQRLEWMGWIDLDNGNTIYDPKFQGRVTITRDTSASTAYMELSSLRSEDTAVYYCARDGYARYYFDYWGQGTLVTVSS

SEQ ID NO: 3763 - protein, 9 aa, Artificial Sequence
  Description of Artificial Sequence: Synthetic Heavy chain variable region CDR H1 amino acid sequence
FNIKDYYMH

SEQ ID NO: 3764 - DNA, 27 bp, Artificial Sequence
  Description of Artificial Sequence: Synthetic Heavy chain variable region CDR H1 nucleic acid sequence
ttcaacatcaaggactactatatgcac

SEQ ID NO: 3765 - protein, 17 aa, Artificial Sequence
  Description of Artificial Sequence: Synthetic Heavy chain variable region CDR H2 amino acid sequence
WIDLDNGNTIYDPKFQG

SEQ ID NO: 3766 - DNA, 51 bp, Artificial Sequence
  Description of Artificial Sequence: Synthetic Heavy chain variable region CDR H2 nucleic acid sequence
tggatcgaccttgacaatggtaacacaatctatgacccgaaatttcagggc

SEQ ID NO: 3767 - protein, 12 aa, Artificial Sequence
  Description of Artificial Sequence: Synthetic Heavy chain variable region CDR H3 amino acid sequence
ARDGYARYYFDY

SEQ ID NO: 3768 - DNA, 36 bp, Artificial Sequence; identical to SEQ ID NO: 3416
  Description of Artificial Sequence: Synthetic Heavy chain variable region CDR H3 nucleic acid sequence

SEQ ID NO: 3769 - DNA, 336 bp, Artificial Sequence; identical to SEQ ID NO: 3673
  Description of Artificial Sequence: Synthetic Light chain variable region nucleic acid sequence

SEQ ID NO: 3770 - protein, 112 aa, Artificial Sequence; identical to SEQ ID NO: 3674
  Description of Artificial Sequence: Synthetic Light chain variable region amino acid sequence

SEQ ID NO: 3771 - protein, 17 aa, Artificial Sequence
  Description of Artificial Sequence: Synthetic Light chain variable region CDR L1 amino acid sequence
KSSQSLLNSRTRKNYLA

SEQ ID NO: 3772 - DNA, 51 bp, Artificial Sequence; identical to SEQ ID NO: 3676
  Description of Artificial Sequence: Synthetic Light chain variable region CDR L1 nucleic acid sequence

SEQ ID NO: 3773 - protein, 7 aa, Artificial Sequence
  Description of Artificial Sequence: Synthetic Light chain variable region CDR L2 amino acid sequence
WASTRES

SEQ ID NO: 3774 - DNA, 21 bp, Artificial Sequence
  Description of Artificial Sequence: Synthetic Light chain variable region CDR L2 nucleic acid sequence
tgggcatctacccgggaatcc

SEQ ID NO: 3775 - protein, 8 aa, Artificial Sequence
  Description of Artificial Sequence: Synthetic Light chain variable region CDR L3 amino acid sequence
KQSYSRRT

SEQ ID NO: 3776 - DNA, 24 bp, Artificial Sequence
  Description of Artificial Sequence: Synthetic Light chain variable region CDR L3 nucleic acid sequence
aagcaatcttattctcggagaact

SEQ ID NO: 3777 - DNA, 357 bp, Artificial Sequence; identical to SEQ ID NO: 3601
  Description of Artificial Sequence: Synthetic Heavy chain variable region nucleic acid sequence

SEQ ID NO: 3778 - protein, 119 aa, Artificial Sequence; identical to SEQ ID NO: 3570
  Description of Artificial Sequence: Synthetic Heavy chain variable region amino acid sequence

SEQ ID NO: 3779 - protein, 9 aa, Artificial Sequence
  Description of Artificial Sequence: Synthetic Heavy chain variable region CDR H1 amino acid sequence
FNIKDYYMH

SEQ ID NO: 3780 - DNA, 27 bp, Artificial Sequence
  Description of Artificial Sequence: Synthetic Heavy chain variable region CDR H1 nucleic acid sequence
ttcaacatcaaggactactatatgcac

SEQ ID NO: 3781 - protein, 17 aa, Artificial Sequence
  Description of Artificial Sequence: Synthetic Heavy chain variable region CDR H2 amino acid sequence
WIDLENGNTIYDPKFQG

SEQ ID NO: 3782 - DNA, 51 bp, Artificial Sequence; identical to SEQ ID NO: 3606
  Description of Artificial Sequence: Synthetic Heavy chain variable region CDR H2 nucleic acid sequence

SEQ ID NO: 3783 - protein, 12 aa, Artificial Sequence
  Description of Artificial Sequence: Synthetic Heavy chain variable region CDR H3 amino acid sequence
ARDGYARYYFDY

SEQ ID NO: 3784 - DNA, 36 bp, Artificial Sequence; identical to SEQ ID NO: 3416
  Description of Artificial Sequence: Synthetic Heavy chain variable region CDR H3 nucleic acid sequence

SEQ ID NO: 3785 - DNA, 336 bp, Artificial Sequence; identical to SEQ ID NO: 3609
  Description of Artificial Sequence: Synthetic Light chain variable region nucleic acid sequence

SEQ ID NO: 3786 - protein, 112 aa, Artificial Sequence; identical to SEQ ID NO: 3610
  Description of Artificial Sequence: Synthetic Light chain variable region amino acid sequence

SEQ ID NO: 3787 - protein, 17 aa, Artificial Sequence
  Description of Artificial Sequence: Synthetic Light chain variable region CDR L1 amino acid sequence
KSSQSLLNGRTRKNYLA

SEQ ID NO: 3788 - DNA, 51 bp, Artificial Sequence; identical to SEQ ID NO: 3612
  Description of Artificial Sequence: Synthetic Light chain variable region CDR L1 nucleic acid sequence

SEQ ID NO: 3789 - protein, 7 aa, Artificial Sequence
  Description of Artificial Sequence: Synthetic Light chain variable region CDR L2 amino acid sequence
WASTRES

SEQ ID NO: 3790 - DNA, 21 bp, Artificial Sequence
  Description of Artificial Sequence: Synthetic Light chain variable region CDR L2 nucleic acid sequence
tgggcatctacccgggaatcc

SEQ ID NO: 3791 - protein, 8 aa, Artificial Sequence
  Description of Artificial Sequence: Synthetic Light chain variable region CDR L3 amino acid sequence
KQSYSRRT

SEQ ID NO: 3792 - DNA, 24 bp, Artificial Sequence
  Description of Artificial Sequence: Synthetic Light chain variable region CDR L3 nucleic acid sequence
aagcaatcttattctcggagaact

SEQ ID NO: 3793 - DNA, 357 bp, Artificial Sequence
  Description of Artificial Sequence: Synthetic Heavy chain variable region nucleic acid sequence
caggtgcagctggtgcagtctggggctgaggtgaagaagcctggggcctcagtgaaggtctcctgcaaggcttctggattcaacatcaaggactactatatgcactgggtgcgacaggcccctggacaaaggcttgagtggatgggatggatcgaccttgaaaatggtaacacaatctatgacccgaaatttcagggcagggtcaccataaccaggaacacgtccgccagcacagcctacatggagctgagcagcctgagatctgaagacacggcggtgtactactgcgcgagagatggatacgctagatattactttgactactggggccaaggaaccctggtcaccgtttcctca

SEQ ID NO: 3794 - protein, 119 aa, Artificial Sequence
  Description of Artificial Sequence: Synthetic Heavy chain variable region amino acid sequence
QVQLVQSGAEVKKPGASVKVSCKASGFNIKDYYMHWVRQAPGQRLEWMGWIDLENGNTIYDPKFQGRVTITRNTSASTAYMELSSLRSEDTAVYYCARDGYARYYFDYWGQGTLVTVSS

SEQ ID NO: 3795 - protein, 9 aa, Artificial Sequence
  Description of Artificial Sequence: Synthetic Heavy chain variable region CDR H1 amino acid sequence
FNIKDYYMH

SEQ ID NO: 3796 - DNA, 27 bp, Artificial Sequence
  Description of Artificial Sequence: Synthetic Heavy chain variable region CDR H1 nucleic acid sequence
ttcaacatcaaggactactatatgcac

SEQ ID NO: 3797 - protein, 17 aa, Artificial Sequence
  Description of Artificial Sequence: Synthetic Heavy chain variable region CDR H2 amino acid sequence
WIDLENGNTIYDPKFQG

SEQ ID NO: 3798 - DNA, 51 bp, Artificial Sequence; identical to SEQ ID NO: 3606
  Description of Artificial Sequence: Synthetic Heavy chain variable region CDR H2 nucleic acid sequence

SEQ ID NO: 3799 - protein, 12 aa, Artificial Sequence
  Description of Artificial Sequence: Synthetic Heavy chain variable region CDR H3 amino acid sequence
ARDGYARYYFDY

SEQ ID NO: 3800 - DNA, 36 bp, Artificial Sequence; identical to SEQ ID NO: 3416
  Description of Artificial Sequence: Synthetic Heavy chain variable region CDR H3 nucleic acid sequence

SEQ ID NO: 3801 - DNA, 336 bp, Artificial Sequence; identical to SEQ ID NO: 3641
  Description of Artificial Sequence: Synthetic Light chain variable region nucleic acid sequence

SEQ ID NO: 3802 - protein, 112 aa, Artificial Sequence; identical to SEQ ID NO: 3642
  Description of Artificial Sequence: Synthetic Light chain variable region amino acid sequence

SEQ ID NO: 3803 - protein, 17 aa, Artificial Sequence
  Description of Artificial Sequence: Synthetic Light chain variable region CDR L1 amino acid sequence
KSSQSLLNSRTRKNYLA

SEQ ID NO: 3804 - DNA, 51 bp, Artificial Sequence; identical to SEQ ID NO: 2988
  Description of Artificial Sequence: Synthetic Light chain variable region CDR L1 nucleic acid sequence

SEQ ID NO: 3805 - protein, 7 aa, Artificial Sequence
  Description of Artificial Sequence: Synthetic Light chain variable region CDR L2 amino acid sequence
WASTRES

SEQ ID NO: 3806 - DNA, 21 bp, Artificial Sequence
  Description of Artificial Sequence: Synthetic Light chain variable region CDR L2 nucleic acid sequence
tgggcatctacccgggaatcc

SEQ ID NO: 3807 - protein, 8 aa, Artificial Sequence
  Description of Artificial Sequence: Synthetic Light chain variable region CDR L3 amino acid sequence
KQSYSRRT

SEQ ID NO: 3808 - DNA, 24 bp, Artificial Sequence
  Description of Artificial Sequence: Synthetic Light chain variable region CDR L3 nucleic acid sequence
aagcaatcttattctcggagaact

SEQ ID NO: 3809 - DNA, 357 bp, Artificial Sequence; identical to SEQ ID NO: 3569
  Description of Artificial Sequence: Synthetic Heavy chain variable region nucleic acid sequence

SEQ ID NO: 3810 - protein, 119 aa, Artificial Sequence; identical to SEQ ID NO: 3570
  Description of Artificial Sequence: Synthetic Heavy chain variable region amino acid sequence

SEQ ID NO: 3811 - protein, 9 aa, Artificial Sequence
  Description of Artificial Sequence: Synthetic Heavy chain variable region CDR H1 amino acid sequence
FNIKDYYMH

SEQ ID NO: 3812 - DNA, 27 bp, Artificial Sequence
  Description of Artificial Sequence: Synthetic Heavy chain variable region CDR H1 nucleic acid sequence
ttcaacatcaaggactactatatgcac

SEQ ID NO: 3813 - protein, 17 aa, Artificial Sequence
  Description of Artificial Sequence: Synthetic Heavy chain variable region CDR H2 amino acid sequence
WIDLENGNTIYDPKFQG

SEQ ID NO: 3814 - DNA, 51 bp, Artificial Sequence; identical to SEQ ID NO: 3574
  Description of Artificial Sequence: Synthetic Heavy chain variable region CDR H2 nucleic acid sequence

SEQ ID NO: 3815 - protein, 12 aa, Artificial Sequence
  Description of Artificial Sequence: Synthetic Heavy chain variable region CDR H3 amino acid sequence
ARDGYARYYFDY

SEQ ID NO: 3816 - DNA, 36 bp, Artificial Sequence; identical to SEQ ID NO: 3416
  Description of Artificial Sequence: Synthetic Heavy chain variable region CDR H3 nucleic acid sequence

SEQ ID NO: 3817 - DNA, 336 bp, Artificial Sequence; identical to SEQ ID NO: 3673
  Description of Artificial Sequence: Synthetic Light chain variable region nucleic acid sequence

SEQ ID NO: 3818 - protein, 112 aa, Artificial Sequence; identical to SEQ ID NO: 3674
  Description of Artificial Sequence: Synthetic Light chain variable region amino acid sequence

SEQ ID NO: 3819 - protein, 17 aa, Artificial Sequence
  Description of Artificial Sequence: Synthetic Light chain variable region CDR L1 amino acid sequence
KSSQSLLNSRTRKNYLA

SEQ ID NO: 3820 - DNA, 51 bp, Artificial Sequence; identical to SEQ ID NO: 3676
  Description of Artificial Sequence: Synthetic Light chain variable region CDR L1 nucleic acid sequence

SEQ ID NO: 3821 - protein, 7 aa, Artificial Sequence
  Description of Artificial Sequence: Synthetic Light chain variable region CDR L2 amino acid sequence
WASTRES

SEQ ID NO: 3822 - DNA, 21 bp, Artificial Sequence
  Description of Artificial Sequence: Synthetic Light chain variable region CDR L2 nucleic acid sequence
tgggcatctacccgggaatcc

SEQ ID NO: 3823 - protein, 8 aa, Artificial Sequence
  Description of Artificial Sequence: Synthetic Light chain variable region CDR L3 amino acid sequence
KQSYSRRT

SEQ ID NO: 3824 - DNA, 24 bp, Artificial Sequence
  Description of Artificial Sequence: Synthetic Light chain variable region CDR L3 nucleic acid sequence
aagcaatcttattctcggagaact

SEQ ID NO: 3825 - DNA, 357 bp, Artificial Sequence; identical to SEQ ID NO: 3569
  Description of Artificial Sequence: Synthetic Heavy chain variable region nucleic acid sequence

SEQ ID NO: 3826 - protein, 119 aa, Artificial Sequence; identical to SEQ ID NO: 3570
  Description of Artificial Sequence: Synthetic Heavy chain variable region amino acid sequence

SEQ ID NO: 3827 - protein, 9 aa, Artificial Sequence
  Description of Artificial Sequence: Synthetic Heavy chain variable region CDR H1 amino acid sequence
FNIKDYYMH

SEQ ID NO: 3828 - DNA, 27 bp, Artificial Sequence
  Description of Artificial Sequence: Synthetic Heavy chain variable region CDR H1 nucleic acid sequence
ttcaacatcaaggactactatatgcac

SEQ ID NO: 3829 - protein, 17 aa, Artificial Sequence
  Description of Artificial Sequence: Synthetic Heavy chain variable region CDR H2 amino acid sequence
WIDLENGNTIYDPKFQG

SEQ ID NO: 3830 - DNA, 51 bp, Artificial Sequence; identical to SEQ ID NO: 3574
  Description of Artificial Sequence: Synthetic Heavy chain variable region CDR H2 nucleic acid sequence

SEQ ID NO: 3831 - protein, 12 aa, Artificial Sequence
  Description of Artificial Sequence: Synthetic Heavy chain variable region CDR H3 amino acid sequence
ARDGYARYYFDY

SEQ ID NO: 3832 - DNA, 36 bp, Artificial Sequence; identical to SEQ ID NO: 3416
  Description of Artificial Sequence: Synthetic Heavy chain variable region CDR H3 nucleic acid sequence

SEQ ID NO: 3833 - DNA, 336 bp, Artificial Sequence
  Description of Artificial Sequence: Synthetic Light chain variable region nucleic acid sequence
gacatcgtgatgacccagtctccagactccctggctgtgtctctgggcgagagggccaccatcaactgcaagtccagccagagtcttttaaacagcagaaccagaaagaactacttagcttggtaccagcagaaaccaggacagcctcctaagctgctcatttactgggcatctacccgggaatccggggtccctgaccgattcagtggcagcgggtctgggacagatttcactctcaccatcagcagcctgcaggctgaagatgtggcagtttattactgtaagcaatcttattctcggagaactttcggcggagggaccaaggtggagatcaaa

SEQ ID NO: 3834 - protein, 112 aa, Artificial Sequence; identical to SEQ ID NO: 3642
  Description of Artificial Sequence: Synthetic Light chain variable region amino acid sequence

SEQ ID NO: 3835 - protein, 17 aa, Artificial Sequence
  Description of Artificial Sequence: Synthetic Light chain variable region CDR L1 amino acid sequence
KSSQSLLNSRTRKNYLA

SEQ ID NO: 3836 - DNA, 51 bp, Artificial Sequence; identical to SEQ ID NO: 2988
  Description of Artificial Sequence: Synthetic Light chain variable region CDR L1 nucleic acid sequence

SEQ ID NO: 3837 - protein, 7 aa, Artificial Sequence
  Description of Artificial Sequence: Synthetic Light chain variable region CDR L2 amino acid sequence
WASTRES

SEQ ID NO: 3838 - DNA, 21 bp, Artificial Sequence
  Description of Artificial Sequence: Synthetic Light chain variable region CDR L2 nucleic acid sequence
tgggcatctacccgggaatcc

SEQ ID NO: 3839 - protein, 8 aa, Artificial Sequence
  Description of Artificial Sequence: Synthetic Light chain variable region CDR L3 amino acid sequence
KQSYSRRT

SEQ ID NO: 3840 - DNA, 24 bp, Artificial Sequence
  Description of Artificial Sequence: Synthetic Light chain variable region CDR L3 nucleic acid sequence
aagcaatcttattctcggagaact

SEQ ID NO: 3841 - DNA, 357 bp, Artificial Sequence
  Description of Artificial Sequence: Synthetic Heavy chain variable region nucleic acid sequence
caggtgcagctggtgcagtctggggctgaggtgaagaagcctggggcctcagtgaaggtctcctgcaaggcttctggactcaacatcaaggactactatatgcactgggtgcgacaggcccctggacaaaggcttgagtggatgggatggatcggctctgaaaatggtaacacaatctatgacccgaagtttcagggcagggtcaccataaccagggacacgtccgccagcacagcctacatggagctgagcagcctgagatctgaggacacggcggtgtactactgcgcgagagatggatacgctagatattacttcgactactggggccaaggaaccctggtcaccgtctcctca

SEQ ID NO: 3842 - protein, 119 aa, Artificial Sequence
  Description of Artificial Sequence: Synthetic Heavy chain variable region amino acid sequence
QVQLVQSGAEVKKPGASVKVSCKASGLNIKDYYMHWVRQAPGQRLEWMGWIGSENGNTIYDPKFQGRVTITRDTSASTAYMELSSLRSEDTAVYYCARDGYARYYFDYWGQGTLVTVSS

SEQ ID NO: 3843 - protein, 9 aa, Artificial Sequence
  Description of Artificial Sequence: Synthetic Heavy chain variable region CDR H1 amino acid sequence
LNIKDYYMH

SEQ ID NO: 3844 - DNA, 27 bp, Artificial Sequence
  Description of Artificial Sequence: Synthetic Heavy chain variable region CDR H1 nucleic acid sequence
ctcaacatcaaggactactatatgcac

SEQ ID NO: 3845 - protein, 17 aa, Artificial Sequence
  Description of Artificial Sequence: Synthetic Heavy chain variable region CDR H2 amino acid sequence
WIGSENGNTIYDPKFQG

SEQ ID NO: 3846 - DNA, 51 bp, Artificial Sequence
  Description of Artificial Sequence: Synthetic Heavy chain variable region CDR H2 nucleic acid sequence
tggatcggctctgaaaatggtaacacaatctatgacccgaagtttcagggc

SEQ ID NO: 3847 - protein, 12 aa, Artificial Sequence
  Description of Artificial Sequence: Synthetic Heavy chain variable region CDR H3 amino acid sequence
ARDGYARYYFDY

SEQ ID NO: 3848 - DNA, 36 bp, Artificial Sequence
  Description of Artificial Sequence: Synthetic Heavy chain variable region CDR H3 nucleic acid sequence
gcgagagatggatacgctagatattacttcgactac

SEQ ID NO: 3849 - DNA, 336 bp, Artificial Sequence; identical to SEQ ID NO: 3673
  Description of Artificial Sequence: Synthetic Light chain variable region nucleic acid sequence

SEQ ID NO: 3850 - protein, 112 aa, Artificial Sequence; identical to SEQ ID NO: 3674
  Description of Artificial Sequence: Synthetic Light chain variable region amino acid sequence

SEQ ID NO: 3851 - protein, 17 aa, Artificial Sequence
  Description of Artificial Sequence: Synthetic Light chain variable region CDR L1 amino acid sequence
KSSQSLLNSRTRKNYLA

SEQ ID NO: 3852 - DNA, 51 bp, Artificial Sequence; identical to SEQ ID NO: 3676
  Description of Artificial Sequence: Synthetic Light chain variable region CDR L1 nucleic acid sequence

SEQ ID NO: 3853 - protein, 7 aa, Artificial Sequence
  Description of Artificial Sequence: Synthetic Light chain variable region CDR L2 amino acid sequence
WASTRES

SEQ ID NO: 3854 - DNA, 21 bp, Artificial Sequence
  Description of Artificial Sequence: Synthetic Light chain variable region CDR L2 nucleic acid sequence
tgggcatctacccgggaatcc

SEQ ID NO: 3855 - protein, 8 aa, Artificial Sequence
  Description of Artificial Sequence: Synthetic Light chain variable region CDR L3 amino acid sequence
KQSYSRRT

SEQ ID NO: 3856 - DNA, 24 bp, Artificial Sequence
  Description of Artificial Sequence: Synthetic Light chain variable region CDR L3 nucleic acid sequence
aagcaatcttattctcggagaact

SEQ ID NO: 3857 - DNA, 357 bp, Artificial Sequence
  Description of Artificial Sequence: Synthetic Heavy chain variable region nucleic acid sequence
caggtgcagctggtgcagtctggggctgaggtgaagaagcctggggcctcagtgaaggtctcctgcaaggcttctggactcaacatcaaggactactatatgcactgggtgcgacaggcccctggacaaaggcttgagtggatgggatggatcgaccttgaaaatggtaacacaatctatgacccgaaatttcagggcagggtcaccataaccagggacacgtccgccagcacagcctacatggagctgagcagcctgagatctgaagacacggcggtgtactactgcgcgagagatggatacgctagatattactttgactactggggccaaggaaccctggtcaccgtctcctca

SEQ ID NO: 3858 - protein, 119 aa, Artificial Sequence
  Description of Artificial Sequence: Synthetic Heavy chain variable region amino acid sequence
QVQLVQSGAEVKKPGASVKVSCKASGLNIKDYYMHWVRQAPGQRLEWMGWIDLENGNTIYDPKFQGRVTITRDTSASTAYMELSSLRSEDTAVYYCARDGYARYYFDYWGQGTLVTVSS

SEQ ID NO: 3859 - protein, 9 aa, Artificial Sequence
  Description of Artificial Sequence: Synthetic Heavy chain variable region CDR H1 amino acid sequence
LNIKDYYMH

SEQ ID NO: 3860 - DNA, 27 bp, Artificial Sequence
  Description of Artificial Sequence: Synthetic Heavy chain variable region CDR H1 nucleic acid sequence
ctcaacatcaaggactactatatgcac

SEQ ID NO: 3861 - protein, 17 aa, Artificial Sequence
  Description of Artificial Sequence: Synthetic Heavy chain variable region CDR H2 amino acid sequence
WIDLENGNTIYDPKFQG

SEQ ID NO: 3862 - DNA, 51 bp, Artificial Sequence; identical to SEQ ID NO: 3606
  Description of Artificial Sequence: Synthetic Heavy chain variable region CDR H2 nucleic acid sequence

SEQ ID NO: 3863 - protein, 12 aa, Artificial Sequence
  Description of Artificial Sequence: Synthetic Heavy chain variable region CDR H3 amino acid sequence
ARDGYARYYFDY

SEQ ID NO: 3864 - DNA, 36 bp, Artificial Sequence; identical to SEQ ID NO: 3416
  Description of Artificial Sequence: Synthetic Heavy chain variable region CDR H3 nucleic acid sequence

SEQ ID NO: 3865 - DNA, 336 bp, Artificial Sequence
  Description of Artificial Sequence: Synthetic Light chain variable region nucleic acid sequence
gacatcgtgatgacccagtctccagactccctggctgtgtctctgggcgagagggccaccatcaactgcaagtccagccagagtcttttaaacagcagaaccggaaagaactacttagcttggtaccagcagaaaccaggacagcctcctaagctgctcatttactgggcatctacccgggaatccggggtccctgaccgattcagtggcagcgggtctgggacagacttcactctcactatcagtagcctgcaggctgaagatgtggcagtttattactgtaagcaatcttattctcggagaactttcggcggagggaccaaggtcgagatcaaa

SEQ ID NO: 3866 - protein, 112 aa, Artificial Sequence
  Description of Artificial Sequence: Synthetic Light chain variable region amino acid sequence
DIVMTQSPDSLAVSLGERATINCKSSQSLLNSRTGKNYLAWYQQKPGQPPKLLIYWASTRESGVPDRFSGSGSGTDFTLTISSLQAEDVAVYYCKQSYSRRTFGGGTKVEIK

SEQ ID NO: 3867 - protein, 17 aa, Artificial Sequence
  Description of Artificial Sequence: Synthetic Light chain variable region CDR L1 amino acid sequence
KSSQSLLNSRTGKNYLA

SEQ ID NO: 3868 - DNA, 51 bp, Artificial Sequence
  Description of Artificial Sequence: Synthetic Light chain variable region CDR L1 nucleic acid sequence
aagtccagccagagtcttttaaacagcagaaccggaaagaactacttagct

SEQ ID NO: 3869 - protein, 7 aa, Artificial Sequence
  Description of Artificial Sequence: Synthetic Light chain variable region CDR L2 amino acid sequence
WASTRES

SEQ ID NO: 3870 - DNA, 21 bp, Artificial Sequence
  Description of Artificial Sequence: Synthetic Light chain variable region CDR L2 nucleic acid sequence
tgggcatctacccgggaatcc

SEQ ID NO: 3871 - protein, 8 aa, Artificial Sequence
  Description of Artificial Sequence: Synthetic Light chain variable region CDR L3 amino acid sequence
KQSYSRRT

SEQ ID NO: 3872 - DNA, 24 bp, Artificial Sequence
  Description of Artificial Sequence: Synthetic Light chain variable region CDR L3 nucleic acid sequence
aagcaatcttattctcggagaact

SEQ ID NO: 3873 - DNA, 357 bp, Artificial Sequence; identical to SEQ ID NO: 3585
  Description of Artificial Sequence: Synthetic Heavy chain variable region nucleic acid sequence

SEQ ID NO: 3874 - protein, 119 aa, Artificial Sequence; identical to SEQ ID NO: 3586
  Description of Artificial Sequence: Synthetic Heavy chain variable region amino acid sequence

SEQ ID NO: 3875 - protein, 9 aa, Artificial Sequence
  Description of Artificial Sequence: Synthetic Heavy chain variable region CDR H1 amino acid sequence
FNTKDYYMH

SEQ ID NO: 3876 - DNA, 27 bp, Artificial Sequence
  Description of Artificial Sequence: Synthetic Heavy chain variable region CDR H1 nucleic acid sequence
ttcaacaccaaggactactatatgcac

SEQ ID NO: 3877 - protein, 17 aa, Artificial Sequence
  Description of Artificial Sequence: Synthetic Heavy chain variable region CDR H2 amino acid sequence
WIGPENGNTIYDPKFQG

SEQ ID NO: 3878 - DNA, 51 bp, Artificial Sequence; identical to SEQ ID NO: 3590
  Description of Artificial Sequence: Synthetic Heavy chain variable region CDR H2 nucleic acid sequence

SEQ ID NO: 3879 - protein, 12 aa, Artificial Sequence
  Description of Artificial Sequence: Synthetic Heavy chain variable region CDR H3 amino acid sequence
ARDGYARYYFDY

SEQ ID NO: 3880 - DNA, 36 bp, Artificial Sequence; identical to SEQ ID NO: 3592
  Description of Artificial Sequence: Synthetic Heavy chain variable region CDR H3 nucleic acid sequence

SEQ ID NO: 3881 - DNA, 336 bp, Artificial Sequence
  Description of Artificial Sequence: Synthetic Light chain variable region nucleic acid sequence
gacatcgtgatgacccagtctccagactccctggctgtgtctctgggcgagagggccaccatcaactgcaagtccagccagagtcttttaaacaacagaaccagaaagaactacttagcttggtaccagcagaaaccaggacagcctcctaagctgctcatttactgggcatctacccgggaatccggggtccctgaccgattcagtggcagcgggtctgggacagatttcactctcaccatcagcagcctgcaggctgaagatgtggcagtttattactgtaagcaatcttattctcggagaactttcggcggagggaccaaggttgagatcaaa

SEQ ID NO: 3882 - protein, 112 aa, Artificial Sequence
  Description of Artificial Sequence: Synthetic Light chain variable region amino acid sequence
DIVMTQSPDSLAVSLGERATINCKSSQSLLNNRTRKNYLAWYQQKPGQPPKLLIYWASTRESGVPDRFSGSGSGTDFTLTISSLQAEDVAVYYCKQSYSRRTFGGGTKVEIK

SEQ ID NO: 3883 - protein, 17 aa, Artificial Sequence
  Description of Artificial Sequence: Synthetic Light chain variable region CDR L1 amino acid sequence
KSSQSLLNNRTRKNYLA

SEQ ID NO: 3884 - DNA, 51 bp, Artificial Sequence
  Description of Artificial Sequence: Synthetic Light chain variable region CDR L1 nucleic acid sequence
aagtccagccagagtcttttaaacaacagaaccagaaagaactacttagct

SEQ ID NO: 3885 - protein, 7 aa, Artificial Sequence
  Description of Artificial Sequence: Synthetic Light chain variable region CDR L2 amino acid sequence
WASTRES

SEQ ID NO: 3886 - DNA, 21 bp, Artificial Sequence
  Description of Artificial Sequence: Synthetic Light chain variable region CDR L2 nucleic acid sequence
tgggcatctacccgggaatcc

SEQ ID NO: 3887 - protein, 8 aa, Artificial Sequence
  Description of Artificial Sequence: Synthetic Light chain variable region CDR L3 amino acid sequence
KQSYSRRT

SEQ ID NO: 3888 - DNA, 24 bp, Artificial Sequence
  Description of Artificial Sequence: Synthetic Light chain variable region CDR L3 nucleic acid sequence
aagcaatcttattctcggagaact

SEQ ID NO: 3889 - DNA, 357 bp, Artificial Sequence; identical to SEQ ID NO: 3649
  Description of Artificial Sequence: Synthetic Heavy chain variable region nucleic acid sequence

SEQ ID NO: 3890 - protein, 119 aa, Artificial Sequence; identical to SEQ ID NO: 3570
  Description of Artificial Sequence: Synthetic Heavy chain variable region amino acid sequence

SEQ ID NO: 3891 - protein, 9 aa, Artificial Sequence
  Description of Artificial Sequence: Synthetic Heavy chain variable region CDR H1 amino acid sequence
FNIKDYYMH

SEQ ID NO: 3892 - DNA, 27 bp, Artificial Sequence
  Description of Artificial Sequence: Synthetic Heavy chain variable region CDR H1 nucleic acid sequence
ttcaacatcaaggactactatatgcac

SEQ ID NO: 3893 - protein, 17 aa, Artificial Sequence
  Description of Artificial Sequence: Synthetic Heavy chain variable region CDR H2 amino acid sequence
WIDLENGNTIYDPKFQG

SEQ ID NO: 3894 - DNA, 51 bp, Artificial Sequence; identical to SEQ ID NO: 3606
  Description of Artificial Sequence: Synthetic Heavy chain variable region CDR H2 nucleic acid sequence

SEQ ID NO: 3895 - protein, 12 aa, Artificial Sequence
  Description of Artificial Sequence: Synthetic Heavy chain variable region CDR H3 amino acid sequence
ARDGYARYYFDY

SEQ ID NO: 3896 - DNA, 36 bp, Artificial Sequence; identical to SEQ ID NO: 3416
  Description of Artificial Sequence: Synthetic Heavy chain variable region CDR H3 nucleic acid sequence

SEQ ID NO: 3897 - DNA, 336 bp, Artificial Sequence; identical to SEQ ID NO: 3577
  Description of Artificial Sequence: Synthetic Light chain variable region nucleic acid sequence

SEQ ID NO: 3898 - protein, 112 aa, Artificial Sequence; identical to SEQ ID NO: 3578
  Description of Artificial Sequence: Synthetic Light chain variable region amino acid sequence

SEQ ID NO: 3899 - protein, 17 aa, Artificial Sequence
  Description of Artificial Sequence: Synthetic Light chain variable region CDR L1 amino acid sequence
KSSQSLLNSRTRKNYLA

SEQ ID NO: 3900 - DNA, 51 bp, Artificial Sequence; identical to SEQ ID NO: 2988
  Description of Artificial Sequence: Synthetic Light chain variable region CDR L1 nucleic acid sequence

SEQ ID NO: 3901 - protein, 7 aa, Artificial Sequence
  Description of Artificial Sequence: Synthetic Light chain variable region CDR L2 amino acid sequence
WASTRES

SEQ ID NO: 3902 - DNA, 21 bp, Artificial Sequence
  Description of Artificial Sequence: Synthetic Light chain variable region CDR L2 nucleic acid sequence
tgggcatctacccgggaatcc

SEQ ID NO: 3903 - protein, 8 aa, Artificial Sequence
  Description of Artificial Sequence: Synthetic Light chain variable region CDR L3 amino acid sequence
KQSYFRRA

SEQ ID NO: 3904 - DNA, 24 bp, Artificial Sequence
  Description of Artificial Sequence: Synthetic Light chain variable region CDR L3 nucleic acid sequence
aagcaatcttattttcggagagct

SEQ ID NO: 3905 - DNA, 357 bp, Artificial Sequence
  Description of Artificial Sequence: Synthetic Heavy chain variable region nucleic acid sequence
caggtgcagctggtgcagtctggggctgaggtgaagaagcctggggcctcagtgaaggtcgcctgcaaggcttctggatccaatatcaaggactactatgtgcactgggtgcgacaggcccctggacaaaggcttgagtggatgggatggatcggccctgaaaatggtaacacagtctatgacccgaagtttcagggcagggtcaccataaccagggacacgtccgccagcacagcctacatggagctgagcagcctgagatctgaagacacggcggtgtactactgcgcgagagatggatacgctagatattactttgactactggggccaaggaaccctggtcaccgtctcctca

SEQ ID NO: 3906 - protein, 119 aa, Artificial Sequence
  Description of Artificial Sequence: Synthetic Heavy chain variable region amino acid sequence
QVQLVQSGAEVKKPGASVKVACKASGSNIKDYYVHWVRQAPGQRLEWMGWIGPENGNTVYDPKFQGRVTITRDTSASTAYMELSSLRSEDTAVYYCARDGYARYYFDYWGQGTLVTVSS

SEQ ID NO: 3907 - protein, 9 aa, Artificial Sequence
  Description of Artificial Sequence: Synthetic Heavy chain variable region CDR H1 amino acid sequence
SNIKDYYVH

SEQ ID NO: 3908 - DNA, 27 bp, Artificial Sequence
  Description of Artificial Sequence: Synthetic Heavy chain variable region CDR H1 nucleic acid sequence
tccaatatcaaggactactatgtgcac

SEQ ID NO: 3909 - protein, 17 aa, Artificial Sequence
  Description of Artificial Sequence: Synthetic Heavy chain variable region CDR H2 amino acid sequence
WIGPENGNTVYDPKFQG

SEQ ID NO: 3910 - DNA, 51 bp, Artificial Sequence
  Description of Artificial Sequence: Synthetic Heavy chain variable region CDR H2 nucleic acid sequence
tggatcggccctgaaaatggtaacacagtctatgacccgaagtttcagggc

SEQ ID NO: 3911 - protein, 12 aa, Artificial Sequence
  Description of Artificial Sequence: Synthetic Heavy chain variable region CDR H3 amino acid sequence
ARDGYARYYFDY

SEQ ID NO: 3912 - DNA, 36 bp, Artificial Sequence; identical to SEQ ID NO: 3416
  Description of Artificial Sequence: Synthetic Heavy chain variable region CDR H3 nucleic acid sequence

SEQ ID NO: 3913 - DNA, 336 bp, Artificial Sequence; identical to SEQ ID NO: 2985
  Description of Artificial Sequence: Synthetic Light chain variable region nucleic acid sequence

SEQ ID NO: 3914 - protein, 112 aa, Artificial Sequence; identical to SEQ ID NO: 2986
  Description of Artificial Sequence: Synthetic Light chain variable region amino acid sequence

SEQ ID NO: 3915 - protein, 17 aa, Artificial Sequence
  Description of Artificial Sequence: Synthetic Light chain variable region CDR L1 amino acid sequence
KSSQSLLNSRTRKNYLA

SEQ ID NO: 3916 - DNA, 51 bp, Artificial Sequence; identical to SEQ ID NO: 2988
  Description of Artificial Sequence: Synthetic Light chain variable region CDR L1 nucleic acid sequence

SEQ ID NO: 3917 - protein, 7 aa, Artificial Sequence
  Description of Artificial Sequence: Synthetic Light chain variable region CDR L2 amino acid sequence
WASTRES

SEQ ID NO: 3918 - DNA, 21 bp, Artificial Sequence
  Description of Artificial Sequence: Synthetic Light chain variable region CDR L2 nucleic acid sequence
tgggcatctacccgggaatcc

SEQ ID NO: 3919 - protein, 8 aa, Artificial Sequence
  Description of Artificial Sequence: Synthetic Light chain variable region CDR L3 amino acid sequence
KQSYSLRT

SEQ ID NO: 3920 - DNA, 24 bp, Artificial Sequence
  Description of Artificial Sequence: Synthetic Light chain variable region CDR L3 nucleic acid sequence
aagcaatcttattctctgagaact

SEQ ID NO: 3921 - DNA, 351 bp, Artificial Sequence
  Description of Artificial Sequence: Synthetic Heavy chain variable region nucleic acid sequence
caggtgcagctggtgcagtctggggctgaggtgaagaagcctggggcctcagtgaaggtttcctgcaaggcatctggatacaccttcaccagccactatatacactgggtgcgacaggcccctggacaagggcttgagtggatgggatggatctaccctggtgatggtagcacaaagtacaacgagaagttcaagggcagagtcaccatgaccgcggacaagtccacgagcacagcctacatggagctgagcagcctgagatctgaggacacggcggtgtactactgcgctagagatggctcatattactttgactactggggccaaggaaccctggtcaccgtctcctca

SEQ ID NO: 3922 - protein, 117 aa, Artificial Sequence
  Description of Artificial Sequence: Synthetic Heavy chain variable region amino acid sequence
QVQLVQSGAEVKKPGASVKVSCKASGYTFTSHYIHWVRQAPGQGLEWMGWIYPGDGSTKYNEKFKGRVTMTADKSTSTAYMELSSLRSEDTAVYYCARDGSYYFDYWGQGTLVTVSS

SEQ ID NO: 3923 - protein, 9 aa, Artificial Sequence
  Description of Artificial Sequence: Synthetic Heavy chain variable region CDR H1 amino acid sequence
YTFTSHYIH

SEQ ID NO: 3924 - DNA, 27 bp, Artificial Sequence
  Description of Artificial Sequence: Synthetic Heavy chain variable region CDR H1 nucleic acid sequence
tacaccttcaccagccactatatacac

SEQ ID NO: 3925 - protein, 17 aa, Artificial Sequence
  Description of Artificial Sequence: Synthetic Heavy chain variable region CDR H2 amino acid sequence
WIYPGDGSTKYNEKFKG

SEQ ID NO: 3926 - DNA, 51 bp, Artificial Sequence; identical to SEQ ID NO: 2982
  Description of Artificial Sequence: Synthetic Heavy chain variable region CDR H2 nucleic acid sequence

SEQ ID NO: 3927 - protein, 10 aa, Artificial Sequence
  Description of Artificial Sequence: Synthetic Heavy chain variable region CDR H3 amino acid sequence
ARDGSYYFDY

SEQ ID NO: 3928 - DNA, 30 bp, Artificial Sequence; identical to SEQ ID NO: 3032
  Description of Artificial Sequence: Synthetic Heavy chain variable region CDR H3 nucleic acid sequence

SEQ ID NO: 3929 - DNA, 336 bp, Artificial Sequence; identical to SEQ ID NO: 2985
  Description of Artificial Sequence: Synthetic Light chain variable region nucleic acid sequence

SEQ ID NO: 3930 - protein, 112 aa, Artificial Sequence; identical to SEQ ID NO: 2986
  Description of Artificial Sequence: Synthetic Light chain variable region amino acid sequence

SEQ ID NO: 3931 - protein, 17 aa, Artificial Sequence
  Description of Artificial Sequence: Synthetic Light chain variable region CDR L1 amino acid sequence
KSSQSLLNSRTRKNYLA

SEQ ID NO: 3932 - DNA, 51 bp, Artificial Sequence; identical to SEQ ID NO: 2988
  Description of Artificial Sequence: Synthetic Light chain variable region CDR L1 nucleic acid sequence

SEQ ID NO: 3933 - protein, 7 aa, Artificial Sequence
  Description of Artificial Sequence: Synthetic Light chain variable region CDR L2 amino acid sequence
WASTRES

SEQ ID NO: 3934 - DNA, 21 bp, Artificial Sequence
  Description of Artificial Sequence: Synthetic Light chain variable region CDR L2 nucleic acid sequence
tgggcatctacccgggaatcc

SEQ ID NO: 3935 - protein, 8 aa, Artificial Sequence
  Description of Artificial Sequence: Synthetic Light chain variable region CDR L3 amino acid sequence
KQSYSLRT

SEQ ID NO: 3936 - DNA, 24 bp, Artificial Sequence
  Description of Artificial Sequence: Synthetic Light chain variable region CDR L3 nucleic acid sequence
aagcaatcttattctctgagaact

SEQ ID NO: 3937 - DNA, 351 bp, Artificial Sequence
  Description of Artificial Sequence: Synthetic Heavy chain variable region nucleic acid sequence
caggtgcagctggtgcagtctggggctgaggtgaagaagcctggggcctcagtgaaggtttcctgcaaggcatctggatacaccttcaccagctcctatatacactgggtgcgacaggcccctggacaagggcttgagtggataggatggatctaccctggtaatgttgacacaaggtacaacgagaagttcaagggcagagtcaccataaccgcggacaagtccgcgagcacagcctacatggagctgagcagcctgagatctgaggacacggcggtgtactactgcgcgagggattacggatactactttgactactggggccaaggaaccctggtcaccgtctcctca

SEQ ID NO: 3938 - protein, 117 aa, Artificial Sequence
  Description of Artificial Sequence: Synthetic Heavy chain variable region amino acid sequence
QVQLVQSGAEVKKPGASVKVSCKASGYTFTSSYIHWVRQAPGQGLEWIGWIYPGNVDTRYNEKFKGRVTITADKSASTAYMELSSLRSEDTAVYYCARDYGYYFDYWGQGTLVTVSS

SEQ ID NO: 3939 - protein, 9 aa, Artificial Sequence
  Description of Artificial Sequence: Synthetic Heavy chain variable region CDR H1 amino acid sequence
YTFTSSYIH

SEQ ID NO: 3940 - DNA, 27 bp, Artificial Sequence
  Description of Artificial Sequence: Synthetic Heavy chain variable region CDR H1 nucleic acid sequence
tacaccttcaccagctcctatatacac

SEQ ID NO: 3941 - protein, 17 aa, Artificial Sequence
  Description of Artificial Sequence: Synthetic Heavy chain variable region CDR H2 amino acid sequence
WIYPGNVDTRYNEKFKG

SEQ ID NO: 3942 - DNA, 51 bp, Artificial Sequence
  Description of Artificial Sequence: Synthetic Heavy chain variable region CDR H2 nucleic acid sequence
tggatctaccctggtaatgttgacacaaggtacaacgagaagttcaagggc

SEQ ID NO: 3943 - protein, 10 aa, Artificial Sequence
  Description of Artificial Sequence: Synthetic Heavy chain variable region CDR H3 amino acid sequence
ARDYGYYFDY

SEQ ID NO: 3944 - DNA, 30 bp, Artificial Sequence; identical to SEQ ID NO: 3208
  Description of Artificial Sequence: Synthetic Heavy chain variable region CDR H3 nucleic acid sequence

SEQ ID NO: 3945 - DNA, 336 bp, Artificial Sequence; identical to SEQ ID NO: 2985
  Description of Artificial Sequence: Synthetic Light chain variable region nucleic acid sequence

SEQ ID NO: 3946 - protein, 112 aa, Artificial Sequence; identical to SEQ ID NO: 2986
  Description of Artificial Sequence: Synthetic Light chain variable region amino acid sequence

SEQ ID NO: 3947 - protein, 17 aa, Artificial Sequence
  Description of Artificial Sequence: Synthetic Light chain variable region CDR L1 amino acid sequence
KSSQSLLNSRTRKNYLA

SEQ ID NO: 3948 - DNA, 51 bp, Artificial Sequence; identical to SEQ ID NO: 2988
  Description of Artificial Sequence: Synthetic Light chain variable region CDR L1 nucleic acid sequence

SEQ ID NO: 3949 - protein, 7 aa, Artificial Sequence
  Description of Artificial Sequence: Synthetic Light chain variable region CDR L2 amino acid sequence
WASTRES

SEQ ID NO: 3950 - DNA, 21 bp, Artificial Sequence
  Description of Artificial Sequence: Synthetic Light chain variable region CDR L2 nucleic acid sequence
tgggcatctacccgggaatcc

SEQ ID NO: 3951 - protein, 8 aa, Artificial Sequence
  Description of Artificial Sequence: Synthetic Light chain variable region CDR L3 amino acid sequence
KQSYSLRT

SEQ ID NO: 3952 - DNA, 24 bp, Artificial Sequence
  Description of Artificial Sequence: Synthetic Light chain variable region CDR L3 nucleic acid sequence
aagcaatcttattctctgagaact

SEQ ID NO: 3953 - DNA, 357 bp, Artificial Sequence; identical to SEQ ID NO: 3425
  Description of Artificial Sequence: Synthetic Heavy chain variable region nucleic acid sequence

SEQ ID NO: 3954 - protein, 119 aa, Artificial Sequence; identical to SEQ ID NO: 3426
  Description of Artificial Sequence: Synthetic Heavy chain variable region amino acid sequence

SEQ ID NO: 3955 - protein, 9 aa, Artificial Sequence
  Description of Artificial Sequence: Synthetic Heavy chain variable region CDR H1 amino acid sequence
FNIKDYYMH

SEQ ID NO: 3956 - DNA, 27 bp, Artificial Sequence
  Description of Artificial Sequence: Synthetic Heavy chain variable region CDR H1 nucleic acid sequence
ttcaacatcaaggactactatatgcac

SEQ ID NO: 3957 - protein, 17 aa, Artificial Sequence
  Description of Artificial Sequence: Synthetic Heavy chain variable region CDR H2 amino acid sequence
WIDPENGNTIYDPKFQG

SEQ ID NO: 3958 - DNA, 51 bp, Artificial Sequence; identical to SEQ ID NO: 3414
  Description of Artificial Sequence: Synthetic Heavy chain variable region CDR H2 nucleic acid sequence

SEQ ID NO: 3959 - protein, 12 aa, Artificial Sequence
  Description of Artificial Sequence: Synthetic Heavy chain variable region CDR H3 amino acid sequence
ARDGYARYYFDY

SEQ ID NO: 3960 - DNA, 36 bp, Artificial Sequence; identical to SEQ ID NO: 3432
  Description of Artificial Sequence: Synthetic Heavy chain variable region CDR H3 nucleic acid sequence

SEQ ID NO: 3961 - DNA, 336 bp, Artificial Sequence; identical to SEQ ID NO: 2985
  Description of Artificial Sequence: Synthetic Light chain variable region nucleic acid sequence

SEQ ID NO: 3962 - protein, 112 aa, Artificial Sequence; identical to SEQ ID NO: 2986
  Description of Artificial Sequence: Synthetic Light chain variable region amino acid sequence

SEQ ID NO: 3963 - protein, 17 aa, Artificial Sequence
  Description of Artificial Sequence: Synthetic Light chain variable region CDR L1 amino acid sequence
KSSQSLLNSRTRKNYLA

SEQ ID NO: 3964 - DNA, 51 bp, Artificial Sequence; identical to SEQ ID NO: 2988
  Description of Artificial Sequence: Synthetic Light chain variable region CDR L1 nucleic acid sequence

SEQ ID NO: 3965 - protein, 7 aa, Artificial Sequence
  Description of Artificial Sequence: Synthetic Light chain variable region CDR L2 amino acid sequence
WASTRES

SEQ ID NO: 3966 - DNA, 21 bp, Artificial Sequence
  Description of Artificial Sequence: Synthetic Light chain variable region CDR L2 nucleic acid sequence
tgggcatctacccgggaatcc

SEQ ID NO: 3967 - protein, 8 aa, Artificial Sequence
  Description of Artificial Sequence: Synthetic Light chain variable region CDR L3 amino acid sequence
KQSYSLRT

SEQ ID NO: 3968 - DNA, 24 bp, Artificial Sequence
  Description of Artificial Sequence: Synthetic Light chain variable region CDR L3 nucleic acid sequence
aagcaatcttattctctgagaact

SEQ ID NO: 3969 - DNA, 357 bp, Artificial Sequence
  Description of Artificial Sequence: Synthetic Heavy chain variable region nucleic acid sequence
caggtgcagctggtgcagtctggggctgaggtgaagaagcctggggcctcagtgaaggtctcctgcaaggcttctggattcaacatcaaggactactatatgcactgggtgcgacaggctcctggacaaaggcttgagtggatgggatggatcgaccttgaaaatggtaacacaatctatgacccgaagtttcagggcagggtcaccataaccagggacacgtccgccagcacagcctacatggagctgagcagcctgagatctgaagacacggcggtgtactactgcgcgagagatggatacgggagatattactttgactactggggccaaggaaccctggtcaccgtctcctca

SEQ ID NO: 3970 - protein, 119 aa, Artificial Sequence
  Description of Artificial Sequence: Synthetic Heavy chain variable region amino acid sequence
QVQLVQSGAEVKKPGASVKVSCKASGFNIKDYYMHWVRQAPGQRLEWMGWIDLENGNTIYDPKFQGRVTITRDTSASTAYMELSSLRSEDTAVYYCARDGYGRYYFDYWGQGTLVTVSS

SEQ ID NO: 3971 - protein, 9 aa, Artificial Sequence
  Description of Artificial Sequence: Synthetic Heavy chain variable region CDR H1 amino acid sequence
FNIKDYYMH

SEQ ID NO: 3972 - DNA, 27 bp, Artificial Sequence
  Description of Artificial Sequence: Synthetic Heavy chain variable region CDR H1 nucleic acid sequence
ttcaacatcaaggactactatatgcac

SEQ ID NO: 3973 - protein, 17 aa, Artificial Sequence
  Description of Artificial Sequence: Synthetic Heavy chain variable region CDR H2 amino acid sequence
WIDLENGNTIYDPKFQG

SEQ ID NO: 3974 - DNA, 51 bp, Artificial Sequence; identical to SEQ ID NO: 3574
  Description of Artificial Sequence: Synthetic Heavy chain variable region CDR H2 nucleic acid sequence

SEQ ID NO: 3975 - protein, 12 aa, Artificial Sequence
  Description of Artificial Sequence: Synthetic Heavy chain variable region CDR H3 amino acid sequence
ARDGYGRYYFDY

SEQ ID NO: 3976 - DNA, 36 bp, Artificial Sequence
  Description of Artificial Sequence: Synthetic Heavy chain variable region CDR H3 nucleic acid sequence
gcgagagatggatacgggagatattactttgactac

SEQ ID NO: 3977 - DNA, 336 bp, Artificial Sequence; identical to SEQ ID NO: 3865
  Description of Artificial Sequence: Synthetic Light chain variable region nucleic acid sequence

SEQ ID NO: 3978 - protein, 112 aa, Artificial Sequence; identical to SEQ ID NO: 3866
  Description of Artificial Sequence: Synthetic Light chain variable region amino acid sequence

SEQ ID NO: 3979 - protein, 17 aa, Artificial Sequence
  Description of Artificial Sequence: Synthetic Light chain variable region CDR L1 amino acid sequence
KSSQSLLNSRTGKNYLA

SEQ ID NO: 3980 - DNA, 51 bp, Artificial Sequence; identical to SEQ ID NO: 3868
  Description of Artificial Sequence: Synthetic Light chain variable region CDR L1 nucleic acid sequence

SEQ ID NO: 3981 - protein, 7 aa, Artificial Sequence
  Description of Artificial Sequence: Synthetic Light chain variable region CDR L2 amino acid sequence
WASTRES

SEQ ID NO: 3982 - DNA, 21 bp, Artificial Sequence
  Description of Artificial Sequence: Synthetic Light chain variable region CDR L2 nucleic acid sequence
tgggcatctacccgggaatcc

SEQ ID NO: 3983 - protein, 8 aa, Artificial Sequence
  Description of Artificial Sequence: Synthetic Light chain variable region CDR L3 amino acid sequence
KQSYSRRT

SEQ ID NO: 3984 - DNA, 24 bp, Artificial Sequence
  Description of Artificial Sequence: Synthetic Light chain variable region CDR L3 nucleic acid sequence
aagcaatcttattctcggagaact

SEQ ID NO: 3985 - DNA, 357 bp, Artificial Sequence
  Description of Artificial Sequence: Synthetic Heavy chain variable region nucleic acid sequence
caggtgcagctggtgcagtctggggctgaggtgaagaagcctggggcctcagtgaaggtctcctgcaaggcttctggattcaacatcaaggactactatatgcactgggtgcgacaggctcctggacaaaggcttgagtggatgggatggatcgaccttgaaaatggtaacacaatctatgacccgaagtttcagggcagggtcaccataaccagggacacgtccgccagcacagcctacatggagctgagcagcctgagatctgaagacacggcggtgtactactgcgcgagagatggatacgctagatattactttgacatttggggccaaggaaccctggtcaccgtctcctca

SEQ ID NO: 3986 - protein, 119 aa, Artificial Sequence
  Description of Artificial Sequence: Synthetic Heavy chain variable region amino acid sequence
QVQLVQSGAEVKKPGASVKVSCKASGFNIKDYYMHWVRQAPGQRLEWMGWIDLENGNTIYDPKFQGRVTITRDTSASTAYMELSSLRSEDTAVYYCARDGYARYYFDIWGQGTLVTVSS

SEQ ID NO: 3987 - protein, 9 aa, Artificial Sequence
  Description of Artificial Sequence: Synthetic Heavy chain variable region CDR H1 amino acid sequence
FNIKDYYMH

SEQ ID NO: 3988 - DNA, 27 bp, Artificial Sequence
  Description of Artificial Sequence: Synthetic Heavy chain variable region CDR H1 nucleic acid sequence
ttcaacatcaaggactactatatgcac

SEQ ID NO: 3989 - protein, 17 aa, Artificial Sequence
  Description of Artificial Sequence: Synthetic Heavy chain variable region CDR H2 amino acid sequence
WIDLENGNTIYDPKFQG

SEQ ID NO: 3990 - DNA, 51 bp, Artificial Sequence; identical to SEQ ID NO: 3574
  Description of Artificial Sequence: Synthetic Heavy chain variable region CDR H2 nucleic acid sequence

SEQ ID NO: 3991 - protein, 12 aa, Artificial Sequence
  Description of Artificial Sequence: Synthetic Heavy chain variable region CDR H3 amino acid sequence
ARDGYARYYFDI

SEQ ID NO: 3992 - DNA, 36 bp, Artificial Sequence
  Description of Artificial Sequence: Synthetic Heavy chain variable region CDR H3 nucleic acid sequence
gcgagagatggatacgctagatattactttgacatt

SEQ ID NO: 3993 - DNA, 336 bp, Artificial Sequence; identical to SEQ ID NO: 3865
  Description of Artificial Sequence: Synthetic Light chain variable region nucleic acid sequence

SEQ ID NO: 3994 - protein, 112 aa, Artificial Sequence; identical to SEQ ID NO: 3866
  Description of Artificial Sequence: Synthetic Light chain variable region amino acid sequence

SEQ ID NO: 3995 - protein, 17 aa, Artificial Sequence
  Description of Artificial Sequence: Synthetic Light chain variable region CDR L1 amino acid sequence
KSSQSLLNSRTGKNYLA

SEQ ID NO: 3996 - DNA, 51 bp, Artificial Sequence; identical to SEQ ID NO: 3868
  Description of Artificial Sequence: Synthetic Light chain variable region CDR L1 nucleic acid sequence

SEQ ID NO: 3997 - protein, 7 aa, Artificial Sequence
  Description of Artificial Sequence: Synthetic Light chain variable region CDR L2 amino acid sequence
WASTRES

SEQ ID NO: 3998 - DNA, 21 bp, Artificial Sequence
  Description of Artificial Sequence: Synthetic Light chain variable region CDR L2 nucleic acid sequence
tgggcatctacccgggaatcc

SEQ ID NO: 3999 - protein, 8 aa, Artificial Sequence
  Description of Artificial Sequence: Synthetic Light chain variable region CDR L3 amino acid sequence
KQSYSRRT

SEQ ID NO: 4000 - DNA, 24 bp, Artificial Sequence
  Description of Artificial Sequence: Synthetic Light chain variable region CDR L3 nucleic acid sequence
aagcaatcttattctcggagaact

SEQ ID NO: 4001 - DNA, 357 bp, Artificial Sequence
  Description of Artificial Sequence: Synthetic Heavy chain variable region nucleic acid sequence
caggtgcagctggtgcagtctggggctgaggtgaagaagcctggggcctcagtgaaggtctcctgcaaggcttctggattcaacatcaaggactactatatgcactgggtgcgacaggctcctggacaaaggcttgagtggatgggatggatcgaccttgaaaatggtaacacaatctatgacccgaagtttcagggcagggtcaccataaccagggacacgtccgccagcacagcctacatggagctgagcagcctgagatctgaagacacggcggtgtactactgcgcgagagatggatacgggagatattactttgacgcttggggccaaggaaccctggtcaccgtctcctca

SEQ ID NO: 4002 - protein, 119 aa, Artificial Sequence
  Description of Artificial Sequence: Synthetic Heavy chain variable region amino acid sequence
QVQLVQSGAEVKKPGASVKVSCKASGFNIKDYYMHWVRQAPGQRLEWMGWIDLENGNTIYDPKFQGRVTITRDTSASTAYMELSSLRSEDTAVYYCARDGYGRYYFDAWGQGTLVTVSS

SEQ ID NO: 4003 - protein, 9 aa, Artificial Sequence
  Description of Artificial Sequence: Synthetic Heavy chain variable region CDR H1 amino acid sequence
FNIKDYYMH

SEQ ID NO: 4004 - DNA, 27 bp, Artificial Sequence
  Description of Artificial Sequence: Synthetic Heavy chain variable region CDR H1 nucleic acid sequence
ttcaacatcaaggactactatatgcac

SEQ ID NO: 4005 - protein, 17 aa, Artificial Sequence
  Description of Artificial Sequence: Synthetic Heavy chain variable region CDR H2 amino acid sequence
WIDLENGNTIYDPKFQG

SEQ ID NO: 4006 - DNA, 51 bp, Artificial Sequence; identical to SEQ ID NO: 3574
  Description of Artificial Sequence: Synthetic Heavy chain variable region CDR H2 nucleic acid sequence

SEQ ID NO: 4007 - protein, 12 aa, Artificial Sequence
  Description of Artificial Sequence: Synthetic Heavy chain variable region CDR H3 amino acid sequence
ARDGYGRYYFDA

SEQ ID NO: 4008 - DNA, 36 bp, Artificial Sequence
  Description of Artificial Sequence: Synthetic Heavy chain variable region CDR H3 nucleic acid sequence
gcgagagatggatacgggagatattactttgacgct

SEQ ID NO: 4009 - DNA, 336 bp, Artificial Sequence; identical to SEQ ID NO: 3865
  Description of Artificial Sequence: Synthetic Light chain variable region nucleic acid sequence

SEQ ID NO: 4010 - protein, 112 aa, Artificial Sequence; identical to SEQ ID NO: 3866
  Description of Artificial Sequence: Synthetic Light chain variable region amino acid sequence

SEQ ID NO: 4011 - protein, 17 aa, Artificial Sequence
  Description of Artificial Sequence: Synthetic Light chain variable region CDR L1 amino acid sequence
KSSQSLLNSRTGKNYLA

SEQ ID NO: 4012 - DNA, 51 bp, Artificial Sequence; identical to SEQ ID NO: 3868
  Description of Artificial Sequence: Synthetic Light chain variable region CDR L1 nucleic acid sequence

SEQ ID NO: 4013 - protein, 7 aa, Artificial Sequence
  Description of Artificial Sequence: Synthetic Light chain variable region CDR L2 amino acid sequence
WASTRES

SEQ ID NO: 4014 - DNA, 21 bp, Artificial Sequence
  Description of Artificial Sequence: Synthetic Light chain variable region CDR L2 nucleic acid sequence
tgggcatctacccgggaatcc

SEQ ID NO: 4015 - protein, 8 aa, Artificial Sequence
  Description of Artificial Sequence: Synthetic Light chain variable region CDR L3 amino acid sequence
KQSYSRRT

SEQ ID NO: 4016 - DNA, 24 bp, Artificial Sequence
  Description of Artificial Sequence: Synthetic Light chain variable region CDR L3 nucleic acid sequence
aagcaatcttattctcggagaact

SEQ ID NO: 4017 - DNA, 357 bp, Artificial Sequence
  Description of Artificial Sequence: Synthetic Heavy chain variable region nucleic acid sequence
caggtgcagctggtgcagtctggggctgaggtgaagaagcctggggcctcagtgaaggtctcctgcaaggcttctggattcaacatcaaggactactatatgcactgggtgcgacaggctcctggacaaaggcttgagtggatgggatggatcgaccttgaaaatggtaacacaatctatgacccgaagtttcagggcagggtcaccataaccagggacacgtccgccagcacagcctacatggagctgagcagcctgagatctgaagacacggcggtgtactactgcgcgagagatggatacgctagatatttttttgactactggggccaaggaaccctggtcaccgtctcctca

SEQ ID NO: 4018 - protein, 119 aa, Artificial Sequence
  Description of Artificial Sequence: Synthetic Heavy chain variable region amino acid sequence
QVQLVQSGAEVKKPGASVKVSCKASGFNIKDYYMHWVRQAPGQRLEWMGWIDLENGNTIYDPKFQGRVTITRDTSASTAYMELSSLRSEDTAVYYCARDGYARYFFDYWGQGTLVTVSS

SEQ ID NO: 4019 - protein, 9 aa, Artificial Sequence
  Description of Artificial Sequence: Synthetic Heavy chain variable region CDR H1 amino acid sequence
FNIKDYYMH

SEQ ID NO: 4020 - DNA, 27 bp, Artificial Sequence
  Description of Artificial Sequence: Synthetic Heavy chain variable region CDR H1 nucleic acid sequence
ttcaacatcaaggactactatatgcac

SEQ ID NO: 4021 - protein, 17 aa, Artificial Sequence
  Description of Artificial Sequence: Synthetic Heavy chain variable region CDR H2 amino acid sequence
WIDLENGNTIYDPKFQG

SEQ ID NO: 4022 - DNA, 51 bp, Artificial Sequence; identical to SEQ ID NO: 3574
  Description of Artificial Sequence: Synthetic Heavy chain variable region CDR H2 nucleic acid sequence

SEQ ID NO: 4023 - protein, 12 aa, Artificial Sequence
  Description of Artificial Sequence: Synthetic Heavy chain variable region CDR H3 amino acid sequence
ARDGYARYFFDY

SEQ ID NO: 4024 - DNA, 36 bp, Artificial Sequence
  Description of Artificial Sequence: Synthetic Heavy chain variable region CDR H3 nucleic acid sequence
gcgagagatggatacgctagatatttttttgactac

SEQ ID NO: 4025 - DNA, 336 bp, Artificial Sequence; identical to SEQ ID NO: 3865
  Description of Artificial Sequence: Synthetic Light chain variable region nucleic acid sequence

SEQ ID NO: 4026 - protein, 112 aa, Artificial Sequence; identical to SEQ ID NO: 3866
  Description of Artificial Sequence: Synthetic Light chain variable region amino acid sequence

SEQ ID NO: 4027 - protein, 17 aa, Artificial Sequence
  Description of Artificial Sequence: Synthetic Light chain variable region CDR L1 amino acid sequence
KSSQSLLNSRTGKNYLA

SEQ ID NO: 4028 - DNA, 51 bp, Artificial Sequence; identical to SEQ ID NO: 3868
  Description of Artificial Sequence: Synthetic Light chain variable region CDR L1 nucleic acid sequence

SEQ ID NO: 4029 - protein, 7 aa, Artificial Sequence
  Description of Artificial Sequence: Synthetic Light chain variable region CDR L2 amino acid sequence
WASTRES

SEQ ID NO: 4030 - DNA, 21 bp, Artificial Sequence
  Description of Artificial Sequence: Synthetic Light chain variable region CDR L2 nucleic acid sequence
tgggcatctacccgggaatcc

SEQ ID NO: 4031 - protein, 8 aa, Artificial Sequence
  Description of Artificial Sequence: Synthetic Light chain variable region CDR L3 amino acid sequence
KQSYSRRT

SEQ ID NO: 4032 - DNA, 24 bp, Artificial Sequence
  Description of Artificial Sequence: Synthetic Light chain variable region CDR L3 nucleic acid sequence
aagcaatcttattctcggagaact

SEQ ID NO: 4033 - DNA, 357 bp, Artificial Sequence
  Description of Artificial Sequence: Synthetic Heavy chain variable region nucleic acid sequence
caggtgcagctggtgcagtctggggctgaggtgaagaagcctggggcctcagtgaaggtctcctgcaaggcttctggattcaacatcaaggactactatatgcactgggtgcgacaggctcctggacaaaggcttgagtggatgggatggatcgaccttgaaaatggtaacacaatctatgacccgaagtttcagggcagggtcaccataaccagggacacgtccgccagcacagcctacatggagctgagcagcctgagatctgaagacacggcggtgtactactgcgcgagagatggatacgggagatatttttttgactactggggccaaggaaccctggtcaccgtctcctca

SEQ ID NO: 4034 - protein, 119 aa, Artificial Sequence
  Description of Artificial Sequence: Synthetic Heavy chain variable region amino acid sequence
QVQLVQSGAEVKKPGASVKVSCKASGFNIKDYYMHWVRQAPGQRLEWMGWIDLENGNTIYDPKFQGRVTITRDTSASTAYMELSSLRSEDTAVYYCARDGYGRYFFDYWGQGTLVTVSS

SEQ ID NO: 4035 - protein, 9 aa, Artificial Sequence
  Description of Artificial Sequence: Synthetic Heavy chain variable region CDR H1 amino acid sequence
FNIKDYYMH

SEQ ID NO: 4036 - DNA, 27 bp, Artificial Sequence
  Description of Artificial Sequence: Synthetic Heavy chain variable region CDR H1 nucleic acid sequence
ttcaacatcaaggactactatatgcac

SEQ ID NO: 4037 - protein, 17 aa, Artificial Sequence
  Description of Artificial Sequence: Synthetic Heavy chain variable region CDR H2 amino acid sequence
WIDLENGNTIYDPKFQG

SEQ ID NO: 4038 - DNA, 51 bp, Artificial Sequence; identical to SEQ ID NO: 3574
  Description of Artificial Sequence: Synthetic Heavy chain variable region CDR H2 nucleic acid sequence

SEQ ID NO: 4039 - protein, 12 aa, Artificial Sequence
  Description of Artificial Sequence: Synthetic Heavy chain variable region CDR H3 amino acid sequence
ARDGYGRYFFDY

SEQ ID NO: 4040 - DNA, 36 bp, Artificial Sequence
  Description of Artificial Sequence: Synthetic Heavy chain variable region CDR H3 nucleic acid sequence
gcgagagatggatacgggagatatttttttgactac

SEQ ID NO: 4041 - DNA, 336 bp, Artificial Sequence
  Description of Artificial Sequence: Synthetic Light chain variable region nucleic acid sequence
gacatcgtgatgacccagtctccagactccctggctgtgtctctgggcgagagggccaccatcaactgcaagtccagccagagtcttttaaacagcagaaccggaaagaactacttggcttggtaccagcagaaaccaggacagcctcctaagctgctcatttactgggcatctacccgggaatccggggtccctgaccgattcagtggcagcgggtctgggacagacttcactctcactatcagtagcctgcaggctgaagatgtggcagtttattactgtaagcaatcttattctcggagaactttcggcggagggaccaaggtcgagatcaaa

SEQ ID NO: 4042 - protein, 112 aa, Artificial Sequence; identical to SEQ ID NO: 3866
  Description of Artificial Sequence: Synthetic Light chain variable region amino acid sequence

SEQ ID NO: 4043 - protein, 17 aa, Artificial Sequence
  Description of Artificial Sequence: Synthetic Light chain variable region CDR L1 amino acid sequence
KSSQSLLNSRTGKNYLA

SEQ ID NO: 4044 - DNA, 51 bp, Artificial Sequence
  Description of Artificial Sequence: Synthetic Light chain variable region CDR L1 nucleic acid sequence
aagtccagccagagtcttttaaacagcagaaccggaaagaactacttggct

SEQ ID NO: 4045 - protein, 7 aa, Artificial Sequence
  Description of Artificial Sequence: Synthetic Light chain variable region CDR L2 amino acid sequence
WASTRES

SEQ ID NO: 4046 - DNA, 21 bp, Artificial Sequence
  Description of Artificial Sequence: Synthetic Light chain variable region CDR L2 nucleic acid sequence
tgggcatctacccgggaatcc

SEQ ID NO: 4047 - protein, 8 aa, Artificial Sequence
  Description of Artificial Sequence: Synthetic Light chain variable region CDR L3 amino acid sequence
KQSYSRRT

SEQ ID NO: 4048 - DNA, 24 bp, Artificial Sequence
  Description of Artificial Sequence: Synthetic Light chain variable region CDR L3 nucleic acid sequence
aagcaatcttattctcggagaact

SEQ ID NO: 4049 - DNA, 357 bp, Artificial Sequence
  Description of Artificial Sequence: Synthetic Heavy chain variable region nucleic acid sequence
caggtgcagctggtgcagtctggggctgaggtgaagaagcctggggcctcagtgaaggtctcctgcaaggcttctggattcaacatcaaggactactatatgcactgggtgcgacaggctcctggacaaaggcttgagtggatgggatggatcgaccttgaaaatggtaacacaatctatgacccgaagtttcagggcagggtcaccataaccagggacacgtccgccagcacagcctacatggagctgagcagcctgagatctgaagacacggcggtgtactactgcgcgagagatggatacgggagatattactacgactactggggccaaggaaccctggtcaccgtctcctca

SEQ ID NO: 4050 - protein, 119 aa, Artificial Sequence
  Description of Artificial Sequence: Synthetic Heavy chain variable region amino acid sequence
QVQLVQSGAEVKKPGASVKVSCKASGFNIKDYYMHWVRQAPGQRLEWMGWIDLENGNTIYDPKFQGRVTITRDTSASTAYMELSSLRSEDTAVYYCARDGYGRYYYDYWGQGTLVTVSS

SEQ ID NO: 4051 - protein, 9 aa, Artificial Sequence
  Description of Artificial Sequence: Synthetic Heavy chain variable region CDR H1 amino acid sequence
FNIKDYYMH

SEQ ID NO: 4052 - DNA, 27 bp, Artificial Sequence
  Description of Artificial Sequence: Synthetic Heavy chain variable region CDR H1 nucleic acid sequence
ttcaacatcaaggactactatatgcac

SEQ ID NO: 4053 - protein, 17 aa, Artificial Sequence
  Description of Artificial Sequence: Synthetic Heavy chain variable region CDR H2 amino acid sequence
WIDLENGNTIYDPKFQG

SEQ ID NO: 4054 - DNA, 51 bp, Artificial Sequence; identical to SEQ ID NO: 3574
  Description of Artificial Sequence: Synthetic Heavy chain variable region CDR H2 nucleic acid sequence

SEQ ID NO: 4055 - protein, 12 aa, Artificial Sequence
  Description of Artificial Sequence: Synthetic Heavy chain variable region CDR H3 amino acid sequence
ARDGYGRYYYDY

SEQ ID NO: 4056 - DNA, 36 bp, Artificial Sequence
  Description of Artificial Sequence: Synthetic Heavy chain variable region CDR H3 nucleic acid sequence
gcgagagatggatacgggagatattactacgactac

SEQ ID NO: 4057 - DNA, 336 bp, Artificial Sequence; identical to SEQ ID NO: 3865
  Description of Artificial Sequence: Synthetic Light chain variable region nucleic acid sequence

SEQ ID NO: 4058 - protein, 112 aa, Artificial Sequence; identical to SEQ ID NO: 3866
  Description of Artificial Sequence: Synthetic Light chain variable region amino acid sequence

SEQ ID NO: 4059 - protein, 17 aa, Artificial Sequence
  Description of Artificial Sequence: Synthetic Light chain variable region CDR L1 amino acid sequence
KSSQSLLNSRTGKNYLA

SEQ ID NO: 4060 - DNA, 51 bp, Artificial Sequence; identical to SEQ ID NO: 3868
  Description of Artificial Sequence: Synthetic Light chain variable region CDR L1 nucleic acid sequence

SEQ ID NO: 4061 - protein, 7 aa, Artificial Sequence
  Description of Artificial Sequence: Synthetic Light chain variable region CDR L2 amino acid sequence
WASTRES

SEQ ID NO: 4062 - DNA, 21 bp, Artificial Sequence
  Description of Artificial Sequence: Synthetic Light chain variable region CDR L2 nucleic acid sequence
tgggcatctacccgggaatcc

SEQ ID NO: 4063 - protein, 8 aa, Artificial Sequence
  Description of Artificial Sequence: Synthetic Light chain variable region CDR L3 amino acid sequence
KQSYSRRT

SEQ ID NO: 4064 - DNA, 24 bp, Artificial Sequence
  Description of Artificial Sequence: Synthetic Light chain variable region CDR L3 nucleic acid sequence
aagcaatcttattctcggagaact

SEQ ID NO: 4065 - DNA, 357 bp, Artificial Sequence
  Description of Artificial Sequence: Synthetic Heavy chain variable region nucleic acid sequence
caggtgcagctggtgcagtctggggctgaggtgaagaagcctggggcctcagtgaaggtctcctgcaaggcttctggattcaacatcaaggactactatatgcactgggtgcgacaggctcctggacaaaggcttgagtggatgggatggatcgaccttgaaaatggtaacacaatctatgacccgaagtttcagggcagggtcaccataaccagggacacgtccgccagcacagcctacatggagctgagcagcctgagatctgaagacacggcggtgtactactgcgcgagagatggatacgggagatattactacgacgtgtggggccaaggaaccctggtcaccgtctcctca

SEQ ID NO: 4066 - protein, 119 aa, Artificial Sequence
  Description of Artificial Sequence: Synthetic Heavy chain variable region amino acid sequence
QVQLVQSGAEVKKPGASVKVSCKASGFNIKDYYMHWVRQAPGQRLEWMGWIDLENGNTIYDPKFQGRVTITRDTSASTAYMELSSLRSEDTAVYYCARDGYGRYYYDVWGQGTLVTVSS

SEQ ID NO: 4067 - protein, 9 aa, Artificial Sequence
  Description of Artificial Sequence: Synthetic Heavy chain variable region CDR H1 amino acid sequence
FNIKDYYMH

SEQ ID NO: 4068 - DNA, 27 bp, Artificial Sequence
  Description of Artificial Sequence: Synthetic Heavy chain variable region CDR H1 nucleic acid sequence
ttcaacatcaaggactactatatgcac

SEQ ID NO: 4069 - protein, 17 aa, Artificial Sequence
  Description of Artificial Sequence: Synthetic Heavy chain variable region CDR H2 amino acid sequence
WIDLENGNTIYDPKFQG

SEQ ID NO: 4070 - DNA, 51 bp, Artificial Sequence; identical to SEQ ID NO: 3574
  Description of Artificial Sequence: Synthetic Heavy chain variable region CDR H2 nucleic acid sequence

SEQ ID NO: 4071 - protein, 12 aa, Artificial Sequence
  Description of Artificial Sequence: Synthetic Heavy chain variable region CDR H3 amino acid sequence
ARDGYGRYYYDV

SEQ ID NO: 4072 - DNA, 36 bp, Artificial Sequence
  Description of Artificial Sequence: Synthetic Heavy chain variable region CDR H3 nucleic acid sequence
gcgagagatggatacgggagatattactacgacgtg

SEQ ID NO: 4073 - DNA, 336 bp, Artificial Sequence; identical to SEQ ID NO: 3865
  Description of Artificial Sequence: Synthetic Light chain variable region nucleic acid sequence

SEQ ID NO: 4074 - protein, 112 aa, Artificial Sequence; identical to SEQ ID NO: 3866
  Description of Artificial Sequence: Synthetic Light chain variable region amino acid sequence

SEQ ID NO: 4075 - protein, 17 aa, Artificial Sequence
  Description of Artificial Sequence: Synthetic Light chain variable region CDR L1 amino acid sequence
KSSQSLLNSRTGKNYLA

SEQ ID NO: 4076 - DNA, 51 bp, Artificial Sequence; identical to SEQ ID NO: 3868
  Description of Artificial Sequence: Synthetic Light chain variable region CDR L1 nucleic acid sequence

SEQ ID NO: 4077 - protein, 7 aa, Artificial Sequence
  Description of Artificial Sequence: Synthetic Light chain variable region CDR L2 amino acid sequence
WASTRES

SEQ ID NO: 4078 - DNA, 21 bp, Artificial Sequence
  Description of Artificial Sequence: Synthetic Light chain variable region CDR L2 nucleic acid sequence
tgggcatctacccgggaatcc

SEQ ID NO: 4079 - protein, 8 aa, Artificial Sequence
  Description of Artificial Sequence: Synthetic Light chain variable region CDR L3 amino acid sequence
KQSYSRRT

SEQ ID NO: 4080 - DNA, 24 bp, Artificial Sequence
  Description of Artificial Sequence: Synthetic Light chain variable region CDR L3 nucleic acid sequence
aagcaatcttattctcggagaact

SEQ ID NO: 4081 - DNA, 357 bp, Artificial Sequence
  Description of Artificial Sequence: Synthetic Heavy chain variable region nucleic acid sequence
caggtgcagctggtgcagtctggggctgaggtgaagaagcctggggcctcagtgaaggtctcctgcaaggcttctggattcaacatcaaggactactatatgcactgggtgcgacaggctcctggacaaaggcttgagtggatgggatggatcgaccttgaaaatggtaacacaatctatgacccgaagtttcagggcagggtcaccataaccagggacacgtccgccagcacagcctacatggagctgagcagcctgagatctgaagacacggcggtgtactactgcgcgagagatggatacgggagatatttttacgactactggggccaaggaaccctggtcaccgtctcctca

SEQ ID NO: 4082 - protein, 119 aa, Artificial Sequence
  Description of Artificial Sequence: Synthetic Heavy chain variable region amino acid sequence
QVQLVQSGAEVKKPGASVKVSCKASGFNIKDYYMHWVRQAPGQRLEWMGWIDLENGNTIYDPKFQGRVTITRDTSASTAYMELSSLRSEDTAVYYCARDGYGRYFYDYWGQGTLVTVSS

SEQ ID NO: 4083 - protein, 9 aa, Artificial Sequence
  Description of Artificial Sequence: Synthetic Heavy chain variable region CDR H1 amino acid sequence
FNIKDYYMH

SEQ ID NO: 4084 - DNA, 27 bp, Artificial Sequence
  Description of Artificial Sequence: Synthetic Heavy chain variable region CDR H1 nucleic acid sequence
ttcaacatcaaggactactatatgcac

SEQ ID NO: 4085 - protein, 17 aa, Artificial Sequence
  Description of Artificial Sequence: Synthetic Heavy chain variable region CDR H2 amino acid sequence
WIDLENGNTIYDPKFQG

SEQ ID NO: 4086 - DNA, 51 bp, Artificial Sequence; identical to SEQ ID NO: 3574
  Description of Artificial Sequence: Synthetic Heavy chain variable region CDR H2 nucleic acid sequence

SEQ ID NO: 4087 - protein, 12 aa, Artificial Sequence
  Description of Artificial Sequence: Synthetic Heavy chain variable region CDR H3 amino acid sequence
ARDGYGRYFYDY

SEQ ID NO: 4088 - DNA, 36 bp, Artificial Sequence
  Description of Artificial Sequence: Synthetic Heavy chain variable region CDR H3 nucleic acid sequence
gcgagagatggatacgggagatatttttacgactac

SEQ ID NO: 4089 - DNA, 336 bp, Artificial Sequence; identical to SEQ ID NO: 3865
  Description of Artificial Sequence: Synthetic Light chain variable region nucleic acid sequence

SEQ ID NO: 4090 - protein, 112 aa, Artificial Sequence; identical to SEQ ID NO: 3866
  Description of Artificial Sequence: Synthetic Light chain variable region amino acid sequence

SEQ ID NO: 4091 - protein, 17 aa, Artificial Sequence
  Description of Artificial Sequence: Synthetic Light chain variable region CDR L1 amino acid sequence
KSSQSLLNSRTGKNYLA

SEQ ID NO: 4092 - DNA, 51 bp, Artificial Sequence; identical to SEQ ID NO: 3868
  Description of Artificial Sequence: Synthetic Light chain variable region CDR L1 nucleic acid sequence

SEQ ID NO: 4093 - protein, 7 aa, Artificial Sequence
  Description of Artificial Sequence: Synthetic Light chain variable region CDR L2 amino acid sequence
WASTRES

SEQ ID NO: 4094 - DNA, 21 bp, Artificial Sequence
  Description of Artificial Sequence: Synthetic Light chain variable region CDR L2 nucleic acid sequence
tgggcatctacccgggaatcc

SEQ ID NO: 4095 - protein, 8 aa, Artificial Sequence
  Description of Artificial Sequence: Synthetic Light chain variable region CDR L3 amino acid sequence
KQSYSRRT

SEQ ID NO: 4096 - DNA, 24 bp, Artificial Sequence
  Description of Artificial Sequence: Synthetic Light chain variable region CDR L3 nucleic acid sequence
aagcaatcttattctcggagaact

SEQ ID NO: 4097 - DNA, 357 bp, Artificial Sequence
  Description of Artificial Sequence: Synthetic Heavy chain variable region nucleic acid sequence
caggtgcagctggtgcagtctggggctgaggtgaagaagcctggggcctcagtgaaggtctcctgcaaggcttctggattcaacatcaaggactactatatgcactgggtgcgacaggctcctggacaaaggcttgagtggatgggatggatcgaccttgaaaatggtaacacaatctatgacccgaagtttcagggcagggtcaccataaccagggacacgtccgccagcacagcctacatggagctgagcagcctgagatctgaagacacggcggtgtactactgcgcgagagatggatacgggagatatttttttgacgtgtggggccaaggaaccctggtcaccgtctcctca

SEQ ID NO: 4098 - protein, 119 aa, Artificial Sequence
  Description of Artificial Sequence: Synthetic Heavy chain variable region amino acid sequence
QVQLVQSGAEVKKPGASVKVSCKASGFNIKDYYMHWVRQAPGQRLEWMGWIDLENGNTIYDPKFQGRVTITRDTSASTAYMELSSLRSEDTAVYYCARDGYGRYFFDVWGQGTLVTVSS

SEQ ID NO: 4099 - protein, 9 aa, Artificial Sequence
  Description of Artificial Sequence: Synthetic Heavy chain variable region CDR H1 amino acid sequence
FNIKDYYMH

SEQ ID NO: 4100 - DNA, 27 bp, Artificial Sequence
  Description of Artificial Sequence: Synthetic Heavy chain variable region CDR H1 nucleic acid sequence
ttcaacatcaaggactactatatgcac

SEQ ID NO: 4101 - protein, 17 aa, Artificial Sequence
  Description of Artificial Sequence: Synthetic Heavy chain variable region CDR H2 amino acid sequence
WIDLENGNTIYDPKFQG

SEQ ID NO: 4102 - DNA, 51 bp, Artificial Sequence; identical to SEQ ID NO: 3574
  Description of Artificial Sequence: Synthetic Heavy chain variable region CDR H2 nucleic acid sequence

SEQ ID NO: 4103 - protein, 12 aa, Artificial Sequence
  Description of Artificial Sequence: Synthetic Heavy chain variable region CDR H3 amino acid sequence
ARDGYGRYFFDV

SEQ ID NO: 4104 - DNA, 36 bp, Artificial Sequence
  Description of Artificial Sequence: Synthetic Heavy chain variable region CDR H3 nucleic acid sequence
gcgagagatggatacgggagatatttttttgacgtg

SEQ ID NO: 4105 - DNA, 336 bp, Artificial Sequence; identical to SEQ ID NO: 3865
  Description of Artificial Sequence: Synthetic Light chain variable region nucleic acid sequence

SEQ ID NO: 4106 - protein, 112 aa, Artificial Sequence; identical to SEQ ID NO: 3866
  Description of Artificial Sequence: Synthetic Light chain variable region amino acid sequence

SEQ ID NO: 4107 - protein, 17 aa, Artificial Sequence
  Description of Artificial Sequence: Synthetic Light chain variable region CDR L1 amino acid sequence
KSSQSLLNSRTGKNYLA

SEQ ID NO: 4108 - DNA, 51 bp, Artificial Sequence; identical to SEQ ID NO: 3868
  Description of Artificial Sequence: Synthetic Light chain variable region CDR L1 nucleic acid sequence

SEQ ID NO: 4109 - protein, 7 aa, Artificial Sequence
  Description of Artificial Sequence: Synthetic Light chain variable region CDR L2 amino acid sequence
WASTRES

SEQ ID NO: 4110 - DNA, 21 bp, Artificial Sequence
  Description of Artificial Sequence: Synthetic Light chain variable region CDR L2 nucleic acid sequence
tgggcatctacccgggaatcc

SEQ ID NO: 4111 - protein, 8 aa, Artificial Sequence
  Description of Artificial Sequence: Synthetic Light chain variable region CDR L3 amino acid sequence
KQSYSRRT

SEQ ID NO: 4112 - DNA, 24 bp, Artificial Sequence
  Description of Artificial Sequence: Synthetic Light chain variable region CDR L3 nucleic acid sequence
aagcaatcttattctcggagaact

SEQ ID NO: 4113 - DNA, 357 bp, Artificial Sequence
  Description of Artificial Sequence: Synthetic Heavy chain variable region nucleic acid sequence
caggtgcagctggtgcagtctggggctgaggtgaagaagcctggggcctcagtgaaggtctcctgcaaggcttctggattcaacatcaaggactactatatgcactgggtgcgacaggctcctggacaaaggcttgagtggatgggatggatcgaccttgaaaatggtaacacaatctatgacccgaagtttcagggcagggtcaccataaccagggacacgtccgccagcacagcctacatggagctgagcagcctgagatctgaagacacggcggtgtactactgcgcgagagatggatacgctagatatttttttgacatatggggccaaggaaccctggtcaccgtctcctca

SEQ ID NO: 4114 - protein, 119 aa, Artificial Sequence
  Description of Artificial Sequence: Synthetic Heavy chain variable region amino acid sequence
QVQLVQSGAEVKKPGASVKVSCKASGFNIKDYYMHWVRQAPGQRLEWMGWIDLENGNTIYDPKFQGRVTITRDTSASTAYMELSSLRSEDTAVYYCARDGYARYFFDIWGQGTLVTVSS

SEQ ID NO: 4115 - protein, 9 aa, Artificial Sequence
  Description of Artificial Sequence: Synthetic Heavy chain variable region CDR H1 amino acid sequence
FNIKDYYMH

SEQ ID NO: 4116 - DNA, 27 bp, Artificial Sequence
  Description of Artificial Sequence: Synthetic Heavy chain variable region CDR H1 nucleic acid sequence
ttcaacatcaaggactactatatgcac

SEQ ID NO: 4117 - protein, 17 aa, Artificial Sequence
  Description of Artificial Sequence: Synthetic Heavy chain variable region CDR H2 amino acid sequence
WIDLENGNTIYDPKFQG

SEQ ID NO: 4118 - DNA, 51 bp, Artificial Sequence; identical to SEQ ID NO: 3574
  Description of Artificial Sequence: Synthetic Heavy chain variable region CDR H2 nucleic acid sequence

SEQ ID NO: 4119 - protein, 12 aa, Artificial Sequence
  Description of Artificial Sequence: Synthetic Heavy chain variable region CDR H3 amino acid sequence
ARDGYARYFFDI

SEQ ID NO: 4120 - DNA, 36 bp, Artificial Sequence
  Description of Artificial Sequence: Synthetic Heavy chain variable region CDR H3 nucleic acid sequence
gcgagagatggatacgctagatatttttttgacata

SEQ ID NO: 4121 - DNA, 336 bp, Artificial Sequence; identical to SEQ ID NO: 3865
  Description of Artificial Sequence: Synthetic Light chain variable region nucleic acid sequence

SEQ ID NO: 4122 - protein, 112 aa, Artificial Sequence; identical to SEQ ID NO: 3866
  Description of Artificial Sequence: Synthetic Light chain variable region amino acid sequence

SEQ ID NO: 4123 - protein, 17 aa, Artificial Sequence
  Description of Artificial Sequence: Synthetic Light chain variable region CDR L1 amino acid sequence
KSSQSLLNSRTGKNYLA

SEQ ID NO: 4124 - DNA, 51 bp, Artificial Sequence; identical to SEQ ID NO: 3868
  Description of Artificial Sequence: Synthetic Light chain variable region CDR L1 nucleic acid sequence

SEQ ID NO: 4125 - protein, 7 aa, Artificial Sequence
  Description of Artificial Sequence: Synthetic Light chain variable region CDR L2 amino acid sequence
WASTRES

SEQ ID NO: 4126 - DNA, 21 bp, Artificial Sequence
  Description of Artificial Sequence: Synthetic Light chain variable region CDR L2 nucleic acid sequence
tgggcatctacccgggaatcc

SEQ ID NO: 4127 - protein, 8 aa, Artificial Sequence
  Description of Artificial Sequence: Synthetic Light chain variable region CDR L3 amino acid sequence
KQSYSRRT

SEQ ID NO: 4128 - DNA, 24 bp, Artificial Sequence
  Description of Artificial Sequence: Synthetic Light chain variable region CDR L3 nucleic acid sequence
aagcaatcttattctcggagaact

SEQ ID NO: 4129 - DNA, 357 bp, Artificial Sequence
  Description of Artificial Sequence: Synthetic Heavy chain variable region nucleic acid sequence
caggtgcagctggtgcagtctggggctgaggtgaagaagcctggggcctcagtgaaggtctcctgcaaggcttctggattcaacatcaaggactactatatgcactgggtgcgacaggctcctggacaaaggcttgagtggatgggatggatcgaccttgaaaatggtaacacaatctatgacccgaagtttcagggcagggtcaccataaccagggacacgtccgccagcacagcctacatggagctgagcagcctgagatctgaagacacggcggtgtactactgcgcgagagatggatacgctagatatttttttgacgtgtggggccaaggaaccctggtcaccgtctcctca

SEQ ID NO: 4130 - protein, 119 aa, Artificial Sequence
  Description of Artificial Sequence: Synthetic Heavy chain variable region amino acid sequence
QVQLVQSGAEVKKPGASVKVSCKASGFNIKDYYMHWVRQAPGQRLEWMGWIDLENGNTIYDPKFQGRVTITRDTSASTAYMELSSLRSEDTAVYYCARDGYARYFFDVWGQGTLVTVSS

SEQ ID NO: 4131 - protein, 9 aa, Artificial Sequence
  Description of Artificial Sequence: Synthetic Heavy chain variable region CDR H1 amino acid sequence
FNIKDYYMH

SEQ ID NO: 4132 - DNA, 27 bp, Artificial Sequence
  Description of Artificial Sequence: Synthetic Heavy chain variable region CDR H1 nucleic acid sequence
ttcaacatcaaggactactatatgcac

SEQ ID NO: 4133 - protein, 17 aa, Artificial Sequence
  Description of Artificial Sequence: Synthetic Heavy chain variable region CDR H2 amino acid sequence
WIDLENGNTIYDPKFQG

SEQ ID NO: 4134 - DNA, 51 bp, Artificial Sequence; identical to SEQ ID NO: 3574
  Description of Artificial Sequence: Synthetic Heavy chain variable region CDR H2 nucleic acid sequence

SEQ ID NO: 4135 - protein, 12 aa, Artificial Sequence
  Description of Artificial Sequence: Synthetic Heavy chain variable region CDR H3 amino acid sequence
ARDGYARYFFDV

SEQ ID NO: 4136 - DNA, 36 bp, Artificial Sequence
  Description of Artificial Sequence: Synthetic Heavy chain variable region CDR H3 nucleic acid sequence
gcgagagatggatacgctagatatttttttgacgtg

SEQ ID NO: 4137 - DNA, 336 bp, Artificial Sequence; identical to SEQ ID NO: 3865
  Description of Artificial Sequence: Synthetic Light chain variable region nucleic acid sequence

SEQ ID NO: 4138 - protein, 112 aa, Artificial Sequence; identical to SEQ ID NO: 3866
  Description of Artificial Sequence: Synthetic Light chain variable region amino acid sequence

SEQ ID NO: 4139 - protein, 17 aa, Artificial Sequence
  Description of Artificial Sequence: Synthetic Light chain variable region CDR L1 amino acid sequence
KSSQSLLNSRTGKNYLA

SEQ ID NO: 4140 - DNA, 51 bp, Artificial Sequence; identical to SEQ ID NO: 3868
  Description of Artificial Sequence: Synthetic Light chain variable region CDR L1 nucleic acid sequence

SEQ ID NO: 4141 - protein, 7 aa, Artificial Sequence
  Description of Artificial Sequence: Synthetic Light chain variable region CDR L2 amino acid sequence
WASTRES

SEQ ID NO: 4142 - DNA, 21 bp, Artificial Sequence
  Description of Artificial Sequence: Synthetic Light chain variable region CDR L2 nucleic acid sequence
tgggcatctacccgggaatcc

SEQ ID NO: 4143 - protein, 8 aa, Artificial Sequence
  Description of Artificial Sequence: Synthetic Light chain variable region CDR L3 amino acid sequence
KQSYSRRT

SEQ ID NO: 4144 - DNA, 24 bp, Artificial Sequence
  Description of Artificial Sequence: Synthetic Light chain variable region CDR L3 nucleic acid sequence
aagcaatcttattctcggagaact

SEQ ID NO: 4145 - DNA, 357 bp, Artificial Sequence
  Description of Artificial Sequence: Synthetic Heavy chain variable region nucleic acid sequence
caggtgcagctggtgcagtctggggctgaggtgaagaagcctggggcctcagtgaaggtctcctgcaaggcttctggattcaacatcaaggactactatatgcactgggtgcgacaggctcctggacaaaggcttgagtggatgggatggatcgaccttgaaaatggtaacacaatctatgacccgaagtttcagggcagggtcaccataaccagggacacgtccgccagcacagcctacatggagctgagcagcctgagatctgaagacacggcggtgtactactgcgcgagagatggatacgctagatatttttacgacgtctggggccaaggaaccctggtcaccgtctcctca

SEQ ID NO: 4146 - protein, 119 aa, Artificial Sequence
  Description of Artificial Sequence: Synthetic Heavy chain variable region amino acid sequence
QVQLVQSGAEVKKPGASVKVSCKASGFNIKDYYMHWVRQAPGQRLEWMGWIDLENGNTIYDPKFQGRVTITRDTSASTAYMELSSLRSEDTAVYYCARDGYARYFYDVWGQGTLVTVSS

SEQ ID NO: 4147 - protein, 9 aa, Artificial Sequence
  Description of Artificial Sequence: Synthetic Heavy chain variable region CDR H1 amino acid sequence
FNIKDYYMH

SEQ ID NO: 4148 - DNA, 27 bp, Artificial Sequence
  Description of Artificial Sequence: Synthetic Heavy chain variable region CDR H1 nucleic acid sequence
ttcaacatcaaggactactatatgcac

SEQ ID NO: 4149 - protein, 17 aa, Artificial Sequence
  Description of Artificial Sequence: Synthetic Heavy chain variable region CDR H2 amino acid sequence
WIDLENGNTIYDPKFQG

SEQ ID NO: 4150 - DNA, 51 bp, Artificial Sequence; identical to SEQ ID NO: 3574
  Description of Artificial Sequence: Synthetic Heavy chain variable region CDR H2 nucleic acid sequence

SEQ ID NO: 4151 - protein, 12 aa, Artificial Sequence
  Description of Artificial Sequence: Synthetic Heavy chain variable region CDR H3 amino acid sequence
ARDGYARYFYDV

SEQ ID NO: 4152 - DNA, 36 bp, Artificial Sequence
  Description of Artificial Sequence: Synthetic Heavy chain variable region CDR H3 nucleic acid sequence
gcgagagatggatacgctagatatttttacgacgtc

SEQ ID NO: 4153 - DNA, 336 bp, Artificial Sequence; identical to SEQ ID NO: 3865
  Description of Artificial Sequence: Synthetic Light chain variable region nucleic acid sequence

SEQ ID NO: 4154 - protein, 112 aa, Artificial Sequence; identical to SEQ ID NO: 3866
  Description of Artificial Sequence: Synthetic Light chain variable region amino acid sequence

SEQ ID NO: 4155 - protein, 17 aa, Artificial Sequence
  Description of Artificial Sequence: Synthetic Light chain variable region CDR L1 amino acid sequence
KSSQSLLNSRTGKNYLA

SEQ ID NO: 4156 - DNA, 51 bp, Artificial Sequence; identical to SEQ ID NO: 3868
  Description of Artificial Sequence: Synthetic Light chain variable region CDR L1 nucleic acid sequence

SEQ ID NO: 4157 - protein, 7 aa, Artificial Sequence
  Description of Artificial Sequence: Synthetic Light chain variable region CDR L2 amino acid sequence
WASTRES

SEQ ID NO: 4158 - DNA, 21 bp, Artificial Sequence
  Description of Artificial Sequence: Synthetic Light chain variable region CDR L2 nucleic acid sequence
tgggcatctacccgggaatcc

SEQ ID NO: 4159 - protein, 8 aa, Artificial Sequence
  Description of Artificial Sequence: Synthetic Light chain variable region CDR L3 amino acid sequence
KQSYSRRT

SEQ ID NO: 4160 - DNA, 24 bp, Artificial Sequence
  Description of Artificial Sequence: Synthetic Light chain variable region CDR L3 nucleic acid sequence
aagcaatcttattctcggagaact

SEQ ID NO: 4161 - DNA, 357 bp, Artificial Sequence
  Description of Artificial Sequence: Synthetic Heavy chain variable region nucleic acid sequence
caggtgcagctggtgcagtctggggctgaggtgaagaagcctggggcctcagtgaaggtctcctgcaaggcttctggattcaacatcaaggactactatatgcactgggtgcgacaggctcctggacaaaggcttgagtggatgggatggatcgaccttgaaaatggtaacacaatctatgacccgaagtttcagggcagggtcaccataaccagggacacgtccgccagcacagcctacatggagctgagcagcctgagatctgaagacacggcggtgtactactgcgcgagagatggatacgggagatatttttacgacgtgtggggccaaggaaccctggtcaccgtctcctca

SEQ ID NO: 4162 - protein, 119 aa, Artificial Sequence
  Description of Artificial Sequence: Synthetic Heavy chain variable region amino acid sequence
QVQLVQSGAEVKKPGASVKVSCKASGFNIKDYYMHWVRQAPGQRLEWMGWIDLENGNTIYDPKFQGRVTITRDTSASTAYMELSSLRSEDTAVYYCARDGYGRYFYDVWGQGTLVTVSS

SEQ ID NO: 4163 - protein, 9 aa, Artificial Sequence
  Description of Artificial Sequence: Synthetic Heavy chain variable region CDR H1 amino acid sequence
FNIKDYYMH

SEQ ID NO: 4164 - DNA, 27 bp, Artificial Sequence
  Description of Artificial Sequence: Synthetic Heavy chain variable region CDR H1 nucleic acid sequence
ttcaacatcaaggactactatatgcac

SEQ ID NO: 4165 - protein, 17 aa, Artificial Sequence
  Description of Artificial Sequence: Synthetic Heavy chain variable region CDR H2 amino acid sequence
WIDLENGNTIYDPKFQG

SEQ ID NO: 4166 - DNA, 51 bp, Artificial Sequence; identical to SEQ ID NO: 3574
  Description of Artificial Sequence: Synthetic Heavy chain variable region CDR H2 nucleic acid sequence

SEQ ID NO: 4167 - protein, 12 aa, Artificial Sequence
  Description of Artificial Sequence: Synthetic Heavy chain variable region CDR H3 amino acid sequence
ARDGYGRYFYDV

SEQ ID NO: 4168 - DNA, 36 bp, Artificial Sequence
  Description of Artificial Sequence: Synthetic Heavy chain variable region CDR H3 nucleic acid sequence
gcgagagatggatacgggagatatttttacgacgtg

SEQ ID NO: 4169 - DNA, 336 bp, Artificial Sequence; identical to SEQ ID NO: 3865
  Description of Artificial Sequence: Synthetic Light chain variable region nucleic acid sequence

SEQ ID NO: 4170 - protein, 112 aa, Artificial Sequence; identical to SEQ ID NO: 3866
  Description of Artificial Sequence: Synthetic Light chain variable region amino acid sequence

SEQ ID NO: 4171 - protein, 17 aa, Artificial Sequence
  Description of Artificial Sequence: Synthetic Light chain variable region CDR L1 amino acid sequence
KSSQSLLNSRTGKNYLA

SEQ ID NO: 4172 - DNA, 51 bp, Artificial Sequence; identical to SEQ ID NO: 3868
  Description of Artificial Sequence: Synthetic Light chain variable region CDR L1 nucleic acid sequence

SEQ ID NO: 4173 - protein, 7 aa, Artificial Sequence
  Description of Artificial Sequence: Synthetic Light chain variable region CDR L2 amino acid sequence
WASTRES

SEQ ID NO: 4174 - DNA, 21 bp, Artificial Sequence
  Description of Artificial Sequence: Synthetic Light chain variable region CDR L2 nucleic acid sequence
tgggcatctacccgggaatcc

SEQ ID NO: 4175 - protein, 8 aa, Artificial Sequence
  Description of Artificial Sequence: Synthetic Light chain variable region CDR L3 amino acid sequence
KQSYSRRT

SEQ ID NO: 4176 - DNA, 24 bp, Artificial Sequence
  Description of Artificial Sequence: Synthetic Light chain variable region CDR L3 nucleic acid sequence
aagcaatcttattctcggagaact

SEQ ID NO: 4177 - DNA, 357 bp, Artificial Sequence
  Description of Artificial Sequence: Synthetic Heavy chain variable region nucleic acid sequence
caggtgcagctggtgcagtctggggctgaggtgaagaagcctggggcctcagtgaaggtctcctgcaaggcttctggattcaacatcaaggactactatatgcactgggtgcgacaggctcctggacaaaggcttgagtggatgggatggatcgaccttgaaaatggtaacacaatctatgacccgaagtttcagggcagggtcaccataaccagggacacgtccgccagcacagcctacatggagctgagcagcctgagatctgaagacacggcggtgtactactgcgcgagagatggatacgctagatatttttacgactactggggccaaggaaccctggtcaccgtctcctca

SEQ ID NO: 4178 - protein, 119 aa, Artificial Sequence
  Description of Artificial Sequence: Synthetic Heavy chain variable region amino acid sequence
QVQLVQSGAEVKKPGASVKVSCKASGFNIKDYYMHWVRQAPGQRLEWMGWIDLENGNTIYDPKFQGRVTITRDTSASTAYMELSSLRSEDTAVYYCARDGYARYFYDYWGQGTLVTVSS

SEQ ID NO: 4179 - protein, 9 aa, Artificial Sequence
  Description of Artificial Sequence: Synthetic Heavy chain variable region CDR H1 amino acid sequence
FNIKDYYMH

SEQ ID NO: 4180 - DNA, 27 bp, Artificial Sequence
  Description of Artificial Sequence: Synthetic Heavy chain variable region CDR H1 nucleic acid sequence
ttcaacatcaaggactactatatgcac

SEQ ID NO: 4181 - protein, 17 aa, Artificial Sequence
  Description of Artificial Sequence: Synthetic Heavy chain variable region CDR H2 amino acid sequence
WIDLENGNTIYDPKFQG

SEQ ID NO: 4182 - DNA, 51 bp, Artificial Sequence; identical to SEQ ID NO: 3574
  Description of Artificial Sequence: Synthetic Heavy chain variable region CDR H2 nucleic acid sequence

SEQ ID NO: 4183 - protein, 12 aa, Artificial Sequence
  Description of Artificial Sequence: Synthetic Heavy chain variable region CDR H3 amino acid sequence
ARDGYARYFYDY

SEQ ID NO: 4184 - DNA, 36 bp, Artificial Sequence
  Description of Artificial Sequence: Synthetic Heavy chain variable region CDR H3 nucleic acid sequence
gcgagagatggatacgctagatatttttacgactac

SEQ ID NO: 4185 - DNA, 336 bp, Artificial Sequence; identical to SEQ ID NO: 3865
  Description of Artificial Sequence: Synthetic Light chain variable region nucleic acid sequence

SEQ ID NO: 4186 - protein, 112 aa, Artificial Sequence; identical to SEQ ID NO: 3866
  Description of Artificial Sequence: Synthetic Light chain variable region amino acid sequence

SEQ ID NO: 4187 - protein, 17 aa, Artificial Sequence
  Description of Artificial Sequence: Synthetic Light chain variable region CDR L1 amino acid sequence
KSSQSLLNSRTGKNYLA

SEQ ID NO: 4188 - DNA, 51 bp, Artificial Sequence; identical to SEQ ID NO: 3868
  Description of Artificial Sequence: Synthetic Light chain variable region CDR L1 nucleic acid sequence

SEQ ID NO: 4189 - protein, 7 aa, Artificial Sequence
  Description of Artificial Sequence: Synthetic Light chain variable region CDR L2 amino acid sequence
WASTRES

SEQ ID NO: 4190 - DNA, 21 bp, Artificial Sequence
  Description of Artificial Sequence: Synthetic Light chain variable region CDR L2 nucleic acid sequence
tgggcatctacccgggaatcc

SEQ ID NO: 4191 - protein, 8 aa, Artificial Sequence
  Description of Artificial Sequence: Synthetic Light chain variable region CDR L3 amino acid sequence
KQSYSRRT

SEQ ID NO: 4192 - DNA, 24 bp, Artificial Sequence
  Description of Artificial Sequence: Synthetic Light chain variable region CDR L3 nucleic acid sequence
aagcaatcttattctcggagaact

SEQ ID NO: 4193 - DNA, 357 bp, Artificial Sequence; identical to SEQ ID NO: 4161
  Description of Artificial Sequence: Synthetic Heavy chain variable region nucleic acid sequence

SEQ ID NO: 4194 - protein, 119 aa, Artificial Sequence; identical to SEQ ID NO: 4162
  Description of Artificial Sequence: Synthetic Heavy chain variable region amino acid sequence

SEQ ID NO: 4195 - protein, 9 aa, Artificial Sequence
  Description of Artificial Sequence: Synthetic Heavy chain variable region CDR H1 amino acid sequence
FNIKDYYMH

SEQ ID NO: 4196 - DNA, 27 bp, Artificial Sequence
  Description of Artificial Sequence: Synthetic Heavy chain variable region CDR H1 nucleic acid sequence
ttcaacatcaaggactactatatgcac

SEQ ID NO: 4197 - protein, 17 aa, Artificial Sequence
  Description of Artificial Sequence: Synthetic Heavy chain variable region CDR H2 amino acid sequence
WIDLENGNTIYDPKFQG

SEQ ID NO: 4198 - DNA, 51 bp, Artificial Sequence; identical to SEQ ID NO: 3574
  Description of Artificial Sequence: Synthetic Heavy chain variable region CDR H2 nucleic acid sequence

SEQ ID NO: 4199 - protein, 12 aa, Artificial Sequence
  Description of Artificial Sequence: Synthetic Heavy chain variable region CDR H3 amino acid sequence
ARDGYGRYFYDV

SEQ ID NO: 4200 - DNA, 36 bp, Artificial Sequence; identical to SEQ ID NO: 4168
  Description of Artificial Sequence: Synthetic Heavy chain variable region CDR H3 nucleic acid sequence

SEQ ID NO: 4201 - DNA, 336 bp, Artificial Sequence; identical to SEQ ID NO: 3865
  Description of Artificial Sequence: Synthetic Light chain variable region nucleic acid sequence

SEQ ID NO: 4202 - protein, 112 aa, Artificial Sequence; identical to SEQ ID NO: 3866
  Description of Artificial Sequence: Synthetic Light chain variable region amino acid sequence

SEQ ID NO: 4203 - protein, 17 aa, Artificial Sequence
  Description of Artificial Sequence: Synthetic Light chain variable region CDR L1 amino acid sequence
KSSQSLLNSRTGKNYLA

SEQ ID NO: 4204 - DNA, 51 bp, Artificial Sequence; identical to SEQ ID NO: 3868
  Description of Artificial Sequence: Synthetic Light chain variable region CDR L1 nucleic acid sequence

SEQ ID NO: 4205 - protein, 7 aa, Artificial Sequence
  Description of Artificial Sequence: Synthetic Light chain variable region CDR L2 amino acid sequence
WASTRES

SEQ ID NO: 4206 - DNA, 21 bp, Artificial Sequence
  Description of Artificial Sequence: Synthetic Light chain variable region CDR L2 nucleic acid sequence
tgggcatctacccgggaatcc

SEQ ID NO: 4207 - protein, 8 aa, Artificial Sequence
  Description of Artificial Sequence: Synthetic Light chain variable region CDR L3 amino acid sequence
KQSYSRRT

SEQ ID NO: 4208 - DNA, 24 bp, Artificial Sequence
  Description of Artificial Sequence: Synthetic Light chain variable region CDR L3 nucleic acid sequence
aagcaatcttattctcggagaact

SEQ ID NO: 4209 - DNA, 357 bp, Artificial Sequence
  Description of Artificial Sequence: Synthetic Heavy chain variable region nucleic acid sequence
caggtgcagctggtgcagtctggggctgaggtgaagaagcctggggcctcagtgaaggtctcctgcaaggcttctggattcaacatcaaggactactatatgcactgggtgcgacaggctcctggacaaaggcttgagtggatgggatggatcgaccctgaaaatggtaacacaatctatgacccgaagtttcagggcagggtcaccataaccagggacacgtccgccagcacagcctacatggagctgagcagcctgagatctgaagacacggcggtgtactactgcgcgagagatggatacgggagatatttttacgacgtgtggggccaaggaaccctggtcaccgtctcctca

SEQ ID NO: 4210 - protein, 119 aa, Artificial Sequence
  Description of Artificial Sequence: Synthetic Heavy chain variable region amino acid sequence
QVQLVQSGAEVKKPGASVKVSCKASGFNIKDYYMHWVRQAPGQRLEWMGWIDPENGNTIYDPKFQGRVTITRDTSASTAYMELSSLRSEDTAVYYCARDGYGRYFYDVWGQGTLVTVSS

SEQ ID NO: 4211 - protein, 9 aa, Artificial Sequence
  Description of Artificial Sequence: Synthetic Heavy chain variable region CDR H1 amino acid sequence
FNIKDYYMH

SEQ ID NO: 4212 - DNA, 27 bp, Artificial Sequence
  Description of Artificial Sequence: Synthetic Heavy chain variable region CDR H1 nucleic acid sequence
ttcaacatcaaggactactatatgcac

SEQ ID NO: 4213 - protein, 17 aa, Artificial Sequence
  Description of Artificial Sequence: Synthetic Heavy chain variable region CDR H2 amino acid sequence
WIDPENGNTIYDPKFQG

SEQ ID NO: 4214 - DNA, 51 bp, Artificial Sequence; identical to SEQ ID NO: 3414
  Description of Artificial Sequence: Synthetic Heavy chain variable region CDR H2 nucleic acid sequence

SEQ ID NO: 4215 - protein, 12 aa, Artificial Sequence
  Description of Artificial Sequence: Synthetic Heavy chain variable region CDR H3 amino acid sequence
ARDGYGRYFYDV

SEQ ID NO: 4216 - DNA, 36 bp, Artificial Sequence; identical to SEQ ID NO: 4168
  Description of Artificial Sequence: Synthetic Heavy chain variable region CDR H3 nucleic acid sequence

SEQ ID NO: 4217 - DNA, 336 bp, Artificial Sequence; identical to SEQ ID NO: 3865
  Description of Artificial Sequence: Synthetic Light chain variable region nucleic acid sequence

SEQ ID NO: 4218 - protein, 112 aa, Artificial Sequence; identical to SEQ ID NO: 3866
  Description of Artificial Sequence: Synthetic Light chain variable region amino acid sequence

SEQ ID NO: 4219 - protein, 17 aa, Artificial Sequence
  Description of Artificial Sequence: Synthetic Light chain variable region CDR L1 amino acid sequence
KSSQSLLNSRTGKNYLA

SEQ ID NO: 4220 - DNA, 51 bp, Artificial Sequence; identical to SEQ ID NO: 3868
  Description of Artificial Sequence: Synthetic Light chain variable region CDR L1 nucleic acid sequence

SEQ ID NO: 4221 - protein, 7 aa, Artificial Sequence
  Description of Artificial Sequence: Synthetic Light chain variable region CDR L2 amino acid sequence
WASTRES

SEQ ID NO: 4222 - DNA, 21 bp, Artificial Sequence
  Description of Artificial Sequence: Synthetic Light chain variable region CDR L2 nucleic acid sequence
tgggcatctacccgggaatcc

SEQ ID NO: 4223 - protein, 8 aa, Artificial Sequence
  Description of Artificial Sequence: Synthetic Light chain variable region CDR L3 amino acid sequence
KQSYSRRT

SEQ ID NO: 4224 - DNA, 24 bp, Artificial Sequence
  Description of Artificial Sequence: Synthetic Light chain variable region CDR L3 nucleic acid sequence
aagcaatcttattctcggagaact

SEQ ID NO: 4225 - DNA, 357 bp, Artificial Sequence
  Description of Artificial Sequence: Synthetic Heavy chain variable region nucleic acid sequence
caggtgcagctggtgcagtctggggctgaggtgaagaagcctggggcctcagtgaaggtctcctgcaaggcttctggattcaacatcaaggactactatatgcactgggtgcgacaggcccctggacaaaggcttgagtggataggatggatcgaccctgaaaatggtaacacaatctatgacccgaagtttcagggcagggtcaccataaccgcggacacgtccgccagcacagcctacatggagctgagcagcctgagatctgaagacacggcggtgtactactgcgctagagacggttacgggagatatttttacgacgtgtggggccaaggaaccctggtcaccgtctcctca

SEQ ID NO: 4226 - protein, 119 aa, Artificial Sequence
  Description of Artificial Sequence: Synthetic Heavy chain variable region amino acid sequence
QVQLVQSGAEVKKPGASVKVSCKASGFNIKDYYMHWVRQAPGQRLEWIGWIDPENGNTIYDPKFQGRVTITADTSASTAYMELSSLRSEDTAVYYCARDGYGRYFYDVWGQGTLVTVSS

SEQ ID NO: 4227 - protein, 9 aa, Artificial Sequence
  Description of Artificial Sequence: Synthetic Heavy chain variable region CDR H1 amino acid sequence
FNIKDYYMH

SEQ ID NO: 4228 - DNA, 27 bp, Artificial Sequence
  Description of Artificial Sequence: Synthetic Heavy chain variable region CDR H1 nucleic acid sequence
ttcaacatcaaggactactatatgcac

SEQ ID NO: 4229 - protein, 17 aa, Artificial Sequence
  Description of Artificial Sequence: Synthetic Heavy chain variable region CDR H2 amino acid sequence
WIDPENGNTIYDPKFQG

SEQ ID NO: 4230 - DNA, 51 bp, Artificial Sequence; identical to SEQ ID NO: 3414
  Description of Artificial Sequence: Synthetic Heavy chain variable region CDR H2 nucleic acid sequence

SEQ ID NO: 4231 - protein, 12 aa, Artificial Sequence
  Description of Artificial Sequence: Synthetic Heavy chain variable region CDR H3 amino acid sequence
ARDGYGRYFYDV

SEQ ID NO: 4232 - DNA, 36 bp, Artificial Sequence
  Description of Artificial Sequence: Synthetic Heavy chain variable region CDR H3 nucleic acid sequence
gctagagacggttacgggagatatttttacgacgtg

SEQ ID NO: 4233 - DNA, 336 bp, Artificial Sequence; identical to SEQ ID NO: 3865
  Description of Artificial Sequence: Synthetic Light chain variable region nucleic acid sequence

SEQ ID NO: 4234 - protein, 112 aa, Artificial Sequence; identical to SEQ ID NO: 3866
  Description of Artificial Sequence: Synthetic Light chain variable region amino acid sequence

SEQ ID NO: 4235 - protein, 17 aa, Artificial Sequence
  Description of Artificial Sequence: Synthetic Light chain variable region CDR L1 amino acid sequence
KSSQSLLNSRTGKNYLA

SEQ ID NO: 4236 - DNA, 51 bp, Artificial Sequence; identical to SEQ ID NO: 3868
  Description of Artificial Sequence: Synthetic Light chain variable region CDR L1 nucleic acid sequence

SEQ ID NO: 4237 - protein, 7 aa, Artificial Sequence
  Description of Artificial Sequence: Synthetic Light chain variable region CDR L2 amino acid sequence
WASTRES

SEQ ID NO: 4238 - DNA, 21 bp, Artificial Sequence
  Description of Artificial Sequence: Synthetic Light chain variable region CDR L2 nucleic acid sequence
tgggcatctacccgggaatcc

SEQ ID NO: 4239 - protein, 8 aa, Artificial Sequence
  Description of Artificial Sequence: Synthetic Light chain variable region CDR L3 amino acid sequence
KQSYSRRT

SEQ ID NO: 4240 - DNA, 24 bp, Artificial Sequence
  Description of Artificial Sequence: Synthetic Light chain variable region CDR L3 nucleic acid sequence
aagcaatcttattctcggagaact

SEQ ID NO: 4241 - DNA, 357 bp, Artificial Sequence; identical to SEQ ID NO: 4161
  Description of Artificial Sequence: Synthetic Heavy chain variable region nucleic acid sequence

SEQ ID NO: 4242 - protein, 119 aa, Artificial Sequence; identical to SEQ ID NO: 4162
  Description of Artificial Sequence: Synthetic Heavy chain variable region amino acid sequence

SEQ ID NO: 4243 - protein, 9 aa, Artificial Sequence
  Description of Artificial Sequence: Synthetic Heavy chain variable region CDR H1 amino acid sequence
FNIKDYYMH

SEQ ID NO: 4244 - DNA, 27 bp, Artificial Sequence
  Description of Artificial Sequence: Synthetic Heavy chain variable region CDR H1 nucleic acid sequence
ttcaacatcaaggactactatatgcac

SEQ ID NO: 4245 - protein, 17 aa, Artificial Sequence
  Description of Artificial Sequence: Synthetic Heavy chain variable region CDR H2 amino acid sequence
WIDLENGNTIYDPKFQG

SEQ ID NO: 4246 - DNA, 51 bp, Artificial Sequence; identical to SEQ ID NO: 3574
  Description of Artificial Sequence: Synthetic Heavy chain variable region CDR H2 nucleic acid sequence

SEQ ID NO: 4247 - protein, 12 aa, Artificial Sequence
  Description of Artificial Sequence: Synthetic Heavy chain variable region CDR H3 amino acid sequence
ARDGYGRYFYDV

SEQ ID NO: 4248 - DNA, 36 bp, Artificial Sequence; identical to SEQ ID NO: 4168
  Description of Artificial Sequence: Synthetic Heavy chain variable region CDR H3 nucleic acid sequence

SEQ ID NO: 4249 - DNA, 336 bp, Artificial Sequence
  Description of Artificial Sequence: Synthetic Light chain variable region nucleic acid sequence
gacatcgtgatgacccagtctccagactccctggctgtgtctctgggcgagagggccaccatcaactgcaagtccagccagagtcttttaaacagcagaaccggaaagaactacttagcttggtaccagcagaaaccaggacagcctcctaagctgctcatttactgggcatctacccgggaatccggggtccctgaccgattcagtggcagcgggtctgggacagacttcactctcactatcagtagcctgcaggctgaagatgtggcagtttattactgtaagcaatcttattctctgagaactttcggcggagggaccaaggtcgagatcaaa

SEQ ID NO: 4250 - protein, 112 aa, Artificial Sequence
  Description of Artificial Sequence: Synthetic Light chain variable region amino acid sequence
DIVMTQSPDSLAVSLGERATINCKSSQSLLNSRTGKNYLAWYQQKPGQPPKLLIYWASTRESGVPDRFSGSGSGTDFTLTISSLQAEDVAVYYCKQSYSLRTFGGGTKVEIK

SEQ ID NO: 4251 - protein, 17 aa, Artificial Sequence
  Description of Artificial Sequence: Synthetic Light chain variable region CDR L1 amino acid sequence
KSSQSLLNSRTGKNYLA

SEQ ID NO: 4252 - DNA, 51 bp, Artificial Sequence; identical to SEQ ID NO: 3868
  Description of Artificial Sequence: Synthetic Light chain variable region CDR L1 nucleic acid sequence

SEQ ID NO: 4253 - protein, 7 aa, Artificial Sequence
  Description of Artificial Sequence: Synthetic Light chain variable region CDR L2 amino acid sequence
WASTRES

SEQ ID NO: 4254 - DNA, 21 bp, Artificial Sequence
  Description of Artificial Sequence: Synthetic Light chain variable region CDR L2 nucleic acid sequence
tgggcatctacccgggaatcc

SEQ ID NO: 4255 - protein, 8 aa, Artificial Sequence
  Description of Artificial Sequence: Synthetic Light chain variable region CDR L3 amino acid sequence
KQSYSLRT

SEQ ID NO: 4256 - DNA, 24 bp, Artificial Sequence
  Description of Artificial Sequence: Synthetic Light chain variable region CDR L3 nucleic acid sequence
aagcaatcttattctctgagaact

SEQ ID NO: 4257 - DNA, 357 bp, Artificial Sequence; identical to SEQ ID NO: 4209
  Description of Artificial Sequence: Synthetic Heavy chain variable region nucleic acid sequence

SEQ ID NO: 4258 - protein, 119 aa, Artificial Sequence; identical to SEQ ID NO: 4210
  Description of Artificial Sequence: Synthetic Heavy chain variable region amino acid sequence

SEQ ID NO: 4259 - protein, 9 aa, Artificial Sequence
  Description of Artificial Sequence: Synthetic Heavy chain variable region CDR H1 amino acid sequence
FNIKDYYMH

SEQ ID NO: 4260 - DNA, 27 bp, Artificial Sequence
  Description of Artificial Sequence: Synthetic Heavy chain variable region CDR H1 nucleic acid sequence
ttcaacatcaaggactactatatgcac

SEQ ID NO: 4261 - protein, 17 aa, Artificial Sequence
  Description of Artificial Sequence: Synthetic Heavy chain variable region CDR H2 amino acid sequence
WIDPENGNTIYDPKFQG

SEQ ID NO: 4262 - DNA, 51 bp, Artificial Sequence; identical to SEQ ID NO: 3414
  Description of Artificial Sequence: Synthetic Heavy chain variable region CDR H2 nucleic acid sequence

SEQ ID NO: 4263 - protein, 12 aa, Artificial Sequence
  Description of Artificial Sequence: Synthetic Heavy chain variable region CDR H3 amino acid sequence
ARDGYGRYFYDV

SEQ ID NO: 4264 - DNA, 36 bp, Artificial Sequence; identical to SEQ ID NO: 4168
  Description of Artificial Sequence: Synthetic Heavy chain variable region CDR H3 nucleic acid sequence

SEQ ID NO: 4265 - DNA, 336 bp, Artificial Sequence; identical to SEQ ID NO: 4249
  Description of Artificial Sequence: Synthetic Light chain variable region nucleic acid sequence

SEQ ID NO: 4266 - protein, 112 aa, Artificial Sequence; identical to SEQ ID NO: 4250
  Description of Artificial Sequence: Synthetic Light chain variable region amino acid sequence

SEQ ID NO: 4267 - protein, 17 aa, Artificial Sequence
  Description of Artificial Sequence: Synthetic Light chain variable region CDR L1 amino acid sequence
KSSQSLLNSRTGKNYLA

SEQ ID NO: 4268 - DNA, 51 bp, Artificial Sequence; identical to SEQ ID NO: 3868
  Description of Artificial Sequence: Synthetic Light chain variable region CDR L1 nucleic acid sequence

SEQ ID NO: 4269 - protein, 7 aa, Artificial Sequence
  Description of Artificial Sequence: Synthetic Light chain variable region CDR L2 amino acid sequence
WASTRES

SEQ ID NO: 4270 - DNA, 21 bp, Artificial Sequence
  Description of Artificial Sequence: Synthetic Light chain variable region CDR L2 nucleic acid sequence
tgggcatctacccgggaatcc

SEQ ID NO: 4271 - protein, 8 aa, Artificial Sequence
  Description of Artificial Sequence: Synthetic Light chain variable region CDR L3 amino acid sequence
KQSYSLRT

SEQ ID NO: 4272 - DNA, 24 bp, Artificial Sequence
  Description of Artificial Sequence: Synthetic Light chain variable region CDR L3 nucleic acid sequence
aagcaatcttattctctgagaact

SEQ ID NO: 4273 - DNA, 357 bp, Artificial Sequence; identical to SEQ ID NO: 4225
  Description of Artificial Sequence: Synthetic Heavy chain variable region nucleic acid sequence

SEQ ID NO: 4274 - protein, 119 aa, Artificial Sequence; identical to SEQ ID NO: 4226
  Description of Artificial Sequence: Synthetic Heavy chain variable region amino acid sequence

SEQ ID NO: 4275 - protein, 9 aa, Artificial Sequence
  Description of Artificial Sequence: Synthetic Heavy chain variable region CDR H1 amino acid sequence
FNIKDYYMH

SEQ ID NO: 4276 - DNA, 27 bp, Artificial Sequence
  Description of Artificial Sequence: Synthetic Heavy chain variable region CDR H1 nucleic acid sequence
ttcaacatcaaggactactatatgcac

SEQ ID NO: 4277 - protein, 17 aa, Artificial Sequence
  Description of Artificial Sequence: Synthetic Heavy chain variable region CDR H2 amino acid sequence
WIDPENGNTIYDPKFQG

SEQ ID NO: 4278 - DNA, 51 bp, Artificial Sequence; identical to SEQ ID NO: 3414
  Description of Artificial Sequence: Synthetic Heavy chain variable region CDR H2 nucleic acid sequence

SEQ ID NO: 4279 - protein, 12 aa, Artificial Sequence
  Description of Artificial Sequence: Synthetic Heavy chain variable region CDR H3 amino acid sequence
ARDGYGRYFYDV

SEQ ID NO: 4280 - DNA, 36 bp, Artificial Sequence; identical to SEQ ID NO: 4232
  Description of Artificial Sequence: Synthetic Heavy chain variable region CDR H3 nucleic acid sequence

SEQ ID NO: 4281 - DNA, 336 bp, Artificial Sequence; identical to SEQ ID NO: 4249
  Description of Artificial Sequence: Synthetic Light chain variable region nucleic acid sequence

SEQ ID NO: 4282 - protein, 112 aa, Artificial Sequence; identical to SEQ ID NO: 4250
  Description of Artificial Sequence: Synthetic Light chain variable region amino acid sequence

SEQ ID NO: 4283 - protein, 17 aa, Artificial Sequence
  Description of Artificial Sequence: Synthetic Light chain variable region CDR L1 amino acid sequence
KSSQSLLNSRTGKNYLA

SEQ ID NO: 4284 - DNA, 51 bp, Artificial Sequence; identical to SEQ ID NO: 3868
  Description of Artificial Sequence: Synthetic Light chain variable region CDR L1 nucleic acid sequence

SEQ ID NO: 4285 - protein, 7 aa, Artificial Sequence
  Description of Artificial Sequence: Synthetic Light chain variable region CDR L2 amino acid sequence
WASTRES

SEQ ID NO: 4286 - DNA, 21 bp, Artificial Sequence
  Description of Artificial Sequence: Synthetic Light chain variable region CDR L2 nucleic acid sequence
tgggcatctacccgggaatcc

SEQ ID NO: 4287 - protein, 8 aa, Artificial Sequence
  Description of Artificial Sequence: Synthetic Light chain variable region CDR L3 amino acid sequence
KQSYSLRT

SEQ ID NO: 4288 - DNA, 24 bp, Artificial Sequence
  Description of Artificial Sequence: Synthetic Light chain variable region CDR L3 nucleic acid sequence
aagcaatcttattctctgagaact

SEQ ID NO: 4289 - DNA, 357 bp, Artificial Sequence
  Description of Artificial Sequence: Synthetic Heavy chain variable region nucleic acid sequence
caggtgcagctggtgcagtctggggctgaggtgaagaagcctggggcctcagtgaaggtctcctgcaaggcttctggattcaacatcaaggactactatatgcactgggtgcgacaggctcctggacaaaggcttgagtggatgggatggatcgaccttgaagaaggtaacacaatctatgacccgaagtttcagggcagggtcaccataaccagggacacgtccgccagcacagcctacatggagctgagcagcctgagatctgaagacacggcggtgtactactgcgcgagagatggatacgggagatatttttacgacgtgtggggccaaggaaccctggtcaccgtctcctca

SEQ ID NO: 4290 - protein, 119 aa, Artificial Sequence
  Description of Artificial Sequence: Synthetic Heavy chain variable region amino acid sequence
QVQLVQSGAEVKKPGASVKVSCKASGFNIKDYYMHWVRQAPGQRLEWMGWIDLEEGNTIYDPKFQGRVTITRDTSASTAYMELSSLRSEDTAVYYCARDGYGRYFYDVWGQGTLVTVSS

SEQ ID NO: 4291 - protein, 9 aa, Artificial Sequence
  Description of Artificial Sequence: Synthetic Heavy chain variable region CDR H1 amino acid sequence
FNIKDYYMH

SEQ ID NO: 4292 - DNA, 27 bp, Artificial Sequence
  Description of Artificial Sequence: Synthetic Heavy chain variable region CDR H1 nucleic acid sequence
ttcaacatcaaggactactatatgcac

SEQ ID NO: 4293 - protein, 17 aa, Artificial Sequence
  Description of Artificial Sequence: Synthetic Heavy chain variable region CDR H2 amino acid sequence
WIDLEEGNTIYDPKFQG

SEQ ID NO: 4294 - DNA, 51 bp, Artificial Sequence
  Description of Artificial Sequence: Synthetic Heavy chain variable region CDR H2 nucleic acid sequence
tggatcgaccttgaagaaggtaacacaatctatgacccgaagtttcagggc

SEQ ID NO: 4295 - protein, 12 aa, Artificial Sequence
  Description of Artificial Sequence: Synthetic Heavy chain variable region CDR H3 amino acid sequence
ARDGYGRYFYDV

SEQ ID NO: 4296 - DNA, 36 bp, Artificial Sequence; identical to SEQ ID NO: 4168
  Description of Artificial Sequence: Synthetic Heavy chain variable region CDR H3 nucleic acid sequence

SEQ ID NO: 4297 - DNA, 336 bp, Artificial Sequence
  Description of Artificial Sequence: Synthetic Light chain variable region nucleic acid sequence
gacatcgtgatgacccagtctccagactccctggctgtgtctctgggcgagagggccaccatcaactgcaagtccagccagagtcttttagaaagcagaaccggaaagaactacttagcttggtaccagcagaaaccaggacagcctcctaagctgctcatttactgggcatctacccgggaatccggggtccctgaccgattcagtggcagcgggtctgggacagacttcactctcactatcagtagcctgcaggctgaagatgtggcagtttattactgtaagcaatcttattctcggagaactttcggcggagggaccaaggtcgagatcaaa

SEQ ID NO: 4298 - protein, 112 aa, Artificial Sequence
  Description of Artificial Sequence: Synthetic Light chain variable region amino acid sequence
DIVMTQSPDSLAVSLGERATINCKSSQSLLESRTGKNYLAWYQQKPGQPPKLLIYWASTRESGVPDRFSGSGSGTDFTLTISSLQAEDVAVYYCKQSYSRRTFGGGTKVEIK

SEQ ID NO: 4299 - protein, 17 aa, Artificial Sequence
  Description of Artificial Sequence: Synthetic Light chain variable region CDR L1 amino acid sequence
KSSQSLLESRTGKNYLA

SEQ ID NO: 4300 - DNA, 51 bp, Artificial Sequence
  Description of Artificial Sequence: Synthetic Light chain variable region CDR L1 nucleic acid sequence
aagtccagccagagtcttttagaaagcagaaccggaaagaactacttagct

SEQ ID NO: 4301 - protein, 7 aa, Artificial Sequence
  Description of Artificial Sequence: Synthetic Light chain variable region CDR L2 amino acid sequence
WASTRES

SEQ ID NO: 4302 - DNA, 21 bp, Artificial Sequence
  Description of Artificial Sequence: Synthetic Light chain variable region CDR L2 nucleic acid sequence
tgggcatctacccgggaatcc

SEQ ID NO: 4303 - protein, 8 aa, Artificial Sequence
  Description of Artificial Sequence: Synthetic Light chain variable region CDR L3 amino acid sequence
KQSYSRRT

SEQ ID NO: 4304 - DNA, 24 bp, Artificial Sequence
  Description of Artificial Sequence: Synthetic Light chain variable region CDR L3 nucleic acid sequence
aagcaatcttattctcggagaact

SEQ ID NO: 4305 - DNA, 357 bp, Artificial Sequence
  Description of Artificial Sequence: Synthetic Heavy chain variable region nucleic acid sequence
caggtgcagctggtgcagtctggggctgaggtgaagaagcctggggcctcagtgaaggtctcctgcaaggcttctggattcaacatcaaggactactatatgcactgggtgcgacaggctcctggacaaaggcttgagtggatgggatggatcgaccttgaaaatggtaacacaatctatcaaccgaagtttcagggcagggtcaccataaccagggacacgtccgccagcacagcctacatggagctgagcagcctgagatctgaagacacggcggtgtactactgcgcgagagatggatacgggagatatttttacgacgtgtggggccaaggaaccctggtcaccgtctcctca

SEQ ID NO: 4306 - protein, 119 aa, Artificial Sequence
  Description of Artificial Sequence: Synthetic Heavy chain variable region amino acid sequence
QVQLVQSGAEVKKPGASVKVSCKASGFNIKDYYMHWVRQAPGQRLEWMGWIDLENGNTIYQPKFQGRVTITRDTSASTAYMELSSLRSEDTAVYYCARDGYGRYFYDVWGQGTLVTVSS

SEQ ID NO: 4307 - protein, 9 aa, Artificial Sequence
  Description of Artificial Sequence: Synthetic Heavy chain variable region CDR H1 amino acid sequence
FNIKDYYMH

SEQ ID NO: 4308 - DNA, 27 bp, Artificial Sequence
  Description of Artificial Sequence: Synthetic Heavy chain variable region CDR H1 nucleic acid sequence
ttcaacatcaaggactactatatgcac

SEQ ID NO: 4309 - protein, 17 aa, Artificial Sequence
  Description of Artificial Sequence: Synthetic Heavy chain variable region CDR H2 amino acid sequence
WIDLENGNTIYQPKFQG

SEQ ID NO: 4310 - DNA, 51 bp, Artificial Sequence
  Description of Artificial Sequence: Synthetic Heavy chain variable region CDR H2 nucleic acid sequence
tggatcgaccttgaaaatggtaacacaatctatcaaccgaagtttcagggc

SEQ ID NO: 4311 - protein, 12 aa, Artificial Sequence
  Description of Artificial Sequence: Synthetic Heavy chain variable region CDR H3 amino acid sequence
ARDGYGRYFYDV

SEQ ID NO: 4312 - DNA, 36 bp, Artificial Sequence; identical to SEQ ID NO: 4168
  Description of Artificial Sequence: Synthetic Heavy chain variable region CDR H3 nucleic acid sequence

SEQ ID NO: 4313 - DNA, 336 bp, Artificial Sequence; identical to SEQ ID NO: 4297
  Description of Artificial Sequence: Synthetic Light chain variable region nucleic acid sequence

SEQ ID NO: 4314 - protein, 112 aa, Artificial Sequence; identical to SEQ ID NO: 4298
  Description of Artificial Sequence: Synthetic Light chain variable region amino acid sequence

SEQ ID NO: 4315 - protein, 17 aa, Artificial Sequence
  Description of Artificial Sequence: Synthetic Light chain variable region CDR L1 amino acid sequence
KSSQSLLESRTGKNYLA

SEQ ID NO: 4316 - DNA, 51 bp, Artificial Sequence; identical to SEQ ID NO: 4300
  Description of Artificial Sequence: Synthetic Light chain variable region CDR L1 nucleic acid sequence

SEQ ID NO: 4317 - protein, 7 aa, Artificial Sequence
  Description of Artificial Sequence: Synthetic Light chain variable region CDR L2 amino acid sequence
WASTRES

SEQ ID NO: 4318 - DNA, 21 bp, Artificial Sequence
  Description of Artificial Sequence: Synthetic Light chain variable region CDR L2 nucleic acid sequence
tgggcatctacccgggaatcc

SEQ ID NO: 4319 - protein, 8 aa, Artificial Sequence
  Description of Artificial Sequence: Synthetic Light chain variable region CDR L3 amino acid sequence
KQSYSRRT

SEQ ID NO: 4320 - DNA, 24 bp, Artificial Sequence
  Description of Artificial Sequence: Synthetic Light chain variable region CDR L3 nucleic acid sequence
aagcaatcttattctcggagaact

SEQ ID NO: 4321 - DNA, 357 bp, Artificial Sequence
  Description of Artificial Sequence: Synthetic Heavy chain variable region nucleic acid sequence
caggtgcagctggtgcagtctggggctgaggtgaagaagcctggggcctcagtgaaggtctcctgcaaggcttctggattcaacatcaaggactactatatgcactgggtgcgacaggctcctggacaaaggcttgagtggatgggatggatcgaccttgaaaatggtaacacaatctatgacccgaagtttcagggcagggtcaccataaccagggacacgtccgccagcacagcctacatggagctgagcagcctgagatctgaagacacggcggtgtactactgcgcgagagaaggatacgggagatatttttacgacgtgtggggccaaggaaccctggtcaccgtctcctca

SEQ ID NO: 4322 - protein, 119 aa, Artificial Sequence
  Description of Artificial Sequence: Synthetic Heavy chain variable region amino acid sequence
QVQLVQSGAEVKKPGASVKVSCKASGFNIKDYYMHWVRQAPGQRLEWMGWIDLENGNTIYDPKFQGRVTITRDTSASTAYMELSSLRSEDTAVYYCAREGYGRYFYDVWGQGTLVTVSS

SEQ ID NO: 4323 - protein, 9 aa, Artificial Sequence
  Description of Artificial Sequence: Synthetic Heavy chain variable region CDR H1 amino acid sequence
FNIKDYYMH

SEQ ID NO: 4324 - DNA, 27 bp, Artificial Sequence
  Description of Artificial Sequence: Synthetic Heavy chain variable region CDR H1 nucleic acid sequence
ttcaacatcaaggactactatatgcac

SEQ ID NO: 4325 - protein, 17 aa, Artificial Sequence
  Description of Artificial Sequence: Synthetic Heavy chain variable region CDR H2 amino acid sequence
WIDLENGNTIYDPKFQG

SEQ ID NO: 4326 - DNA, 51 bp, Artificial Sequence; identical to SEQ ID NO: 3574
  Description of Artificial Sequence: Synthetic Heavy chain variable region CDR H2 nucleic acid sequence

SEQ ID NO: 4327 - protein, 12 aa, Artificial Sequence
  Description of Artificial Sequence: Synthetic Heavy chain variable region CDR H3 amino acid sequence
AREGYGRYFYDV

SEQ ID NO: 4328 - DNA, 36 bp, Artificial Sequence
  Description of Artificial Sequence: Synthetic Heavy chain variable region CDR H3 nucleic acid sequence
gcgagagaaggatacgggagatatttttacgacgtg

SEQ ID NO: 4329 - DNA, 336 bp, Artificial Sequence; identical to SEQ ID NO: 4297
  Description of Artificial Sequence: Synthetic Light chain variable region nucleic acid sequence

SEQ ID NO: 4330 - protein, 112 aa, Artificial Sequence; identical to SEQ ID NO: 4298
  Description of Artificial Sequence: Synthetic Light chain variable region amino acid sequence

SEQ ID NO: 4331 - protein, 17 aa, Artificial Sequence
  Description of Artificial Sequence: Synthetic Light chain variable region CDR L1 amino acid sequence
KSSQSLLESRTGKNYLA

SEQ ID NO: 4332 - DNA, 51 bp, Artificial Sequence; identical to SEQ ID NO: 4300
  Description of Artificial Sequence: Synthetic Light chain variable region CDR L1 nucleic acid sequence

SEQ ID NO: 4333 - protein, 7 aa, Artificial Sequence
  Description of Artificial Sequence: Synthetic Light chain variable region CDR L2 amino acid sequence
WASTRES

SEQ ID NO: 4334 - DNA, 21 bp, Artificial Sequence
  Description of Artificial Sequence: Synthetic Light chain variable region CDR L2 nucleic acid sequence
tgggcatctacccgggaatcc

SEQ ID NO: 4335 - protein, 8 aa, Artificial Sequence
  Description of Artificial Sequence: Synthetic Light chain variable region CDR L3 amino acid sequence
KQSYSRRT

SEQ ID NO: 4336 - DNA, 24 bp, Artificial Sequence
  Description of Artificial Sequence: Synthetic Light chain variable region CDR L3 nucleic acid sequence
aagcaatcttattctcggagaact

SEQ ID NO: 4337 - DNA, 357 bp, Artificial Sequence
  Description of Artificial Sequence: Synthetic Heavy chain variable region nucleic acid sequence
caggtgcagctggtgcagtctggggctgaggtgaagaagcctggggcctcagtgaaggtctcctgcaaggcttctggattcaacatcaaggactactatatgcactgggtgcgacaggctcctggacaaaggcttgagtggatgggatggatcgaccttgaagaaggtaacacaatctatcaaccgaagtttcagggcagggtcaccataaccagggacacgtccgccagcacagcctacatggagctgagcagcctgagatctgaagacacggcggtgtactactgcgcgagagatggatacgggagatatttttacgacgtgtggggccaaggaaccctggtcaccgtctcctca

SEQ ID NO: 4338 - protein, 119 aa, Artificial Sequence
  Description of Artificial Sequence: Synthetic Heavy chain variable region amino acid sequence
QVQLVQSGAEVKKPGASVKVSCKASGFNIKDYYMHWVRQAPGQRLEWMGWIDLEEGNTIYQPKFQGRVTITRDTSASTAYMELSSLRSEDTAVYYCARDGYGRYFYDVWGQGTLVTVSS

SEQ ID NO: 4339 - protein, 9 aa, Artificial Sequence
  Description of Artificial Sequence: Synthetic Heavy chain variable region CDR H1 amino acid sequence
FNIKDYYMH

SEQ ID NO: 4340 - DNA, 27 bp, Artificial Sequence
  Description of Artificial Sequence: Synthetic Heavy chain variable region CDR H1 nucleic acid sequence
ttcaacatcaaggactactatatgcac

SEQ ID NO: 4341 - protein, 17 aa, Artificial Sequence
  Description of Artificial Sequence: Synthetic Heavy chain variable region CDR H2 amino acid sequence
WIDLEEGNTIYQPKFQG

SEQ ID NO: 4342 - DNA, 51 bp, Artificial Sequence
  Description of Artificial Sequence: Synthetic Heavy chain variable region CDR H2 nucleic acid sequence
tggatcgaccttgaagaaggtaacacaatctatcaaccgaagtttcagggc

SEQ ID NO: 4343 - protein, 12 aa, Artificial Sequence
  Description of Artificial Sequence: Synthetic Heavy chain variable region CDR H3 amino acid sequence
ARDGYGRYFYDV

SEQ ID NO: 4344 - DNA, 36 bp, Artificial Sequence; identical to SEQ ID NO: 4168
  Description of Artificial Sequence: Synthetic Heavy chain variable region CDR H3 nucleic acid sequence

SEQ ID NO: 4345 - DNA, 336 bp, Artificial Sequence; identical to SEQ ID NO: 4297
  Description of Artificial Sequence: Synthetic Light chain variable region nucleic acid sequence

SEQ ID NO: 4346 - protein, 112 aa, Artificial Sequence; identical to SEQ ID NO: 4298
  Description of Artificial Sequence: Synthetic Light chain variable region amino acid sequence

SEQ ID NO: 4347 - protein, 17 aa, Artificial Sequence
  Description of Artificial Sequence: Synthetic Light chain variable region CDR L1 amino acid sequence
KSSQSLLESRTGKNYLA

SEQ ID NO: 4348 - DNA, 51 bp, Artificial Sequence; identical to SEQ ID NO: 4300
  Description of Artificial Sequence: Synthetic Light chain variable region CDR L1 nucleic acid sequence

SEQ ID NO: 4349 - protein, 7 aa, Artificial Sequence
  Description of Artificial Sequence: Synthetic Light chain variable region CDR L2 amino acid sequence
WASTRES

SEQ ID NO: 4350 - DNA, 21 bp, Artificial Sequence
  Description of Artificial Sequence: Synthetic Light chain variable region CDR L2 nucleic acid sequence
tgggcatctacccgggaatcc

SEQ ID NO: 4351 - protein, 8 aa, Artificial Sequence
  Description of Artificial Sequence: Synthetic Light chain variable region CDR L3 amino acid sequence
KQSYSRRT

SEQ ID NO: 4352 - DNA, 24 bp, Artificial Sequence
  Description of Artificial Sequence: Synthetic Light chain variable region CDR L3 nucleic acid sequence
aagcaatcttattctcggagaact

SEQ ID NO: 4353 - DNA, 357 bp, Artificial Sequence
  Description of Artificial Sequence: Synthetic Heavy chain variable region nucleic acid sequence
caggtgcagctggtgcagtctggggctgaggtgaagaagcctggggcctcagtgaaggtctcctgcaaggcttctggattcaacatcaaggactactatatgcactgggtgcgacaggctcctggacaaaggcttgagtggatgggatggatcgaccttgaaaatggtaacacaatctatcaaccgaagtttcagggcagggtcaccataaccagggacacgtccgccagcacagcctacatggagctgagcagcctgagatctgaagacacggcggtgtactactgcgcgagagaaggatacgggagatatttttacgacgtgtggggccaaggaaccctggtcaccgtctcctca

SEQ ID NO: 4354 - protein, 119 aa, Artificial Sequence
  Description of Artificial Sequence: Synthetic Heavy chain variable region amino acid sequence
QVQLVQSGAEVKKPGASVKVSCKASGFNIKDYYMHWVRQAPGQRLEWMGWIDLENGNTIYQPKFQGRVTITRDTSASTAYMELSSLRSEDTAVYYCAREGYGRYFYDVWGQGTLVTVSS

SEQ ID NO: 4355 - protein, 9 aa, Artificial Sequence
  Description of Artificial Sequence: Synthetic Heavy chain variable region CDR H1 amino acid sequence
FNIKDYYMH

SEQ ID NO: 4356 - DNA, 27 bp, Artificial Sequence
  Description of Artificial Sequence: Synthetic Heavy chain variable region CDR H1 nucleic acid sequence
ttcaacatcaaggactactatatgcac

SEQ ID NO: 4357 - protein, 17 aa, Artificial Sequence
  Description of Artificial Sequence: Synthetic Heavy chain variable region CDR H2 amino acid sequence
WIDLENGNTIYQPKFQG

SEQ ID NO: 4358 - DNA, 51 bp, Artificial Sequence; identical to SEQ ID NO: 4310
  Description of Artificial Sequence: Synthetic Heavy chain variable region CDR H2 nucleic acid sequence

SEQ ID NO: 4359 - protein, 12 aa, Artificial Sequence
  Description of Artificial Sequence: Synthetic Heavy chain variable region CDR H3 amino acid sequence
AREGYGRYFYDV

SEQ ID NO: 4360 - DNA, 36 bp, Artificial Sequence; identical to SEQ ID NO: 4328
  Description of Artificial Sequence: Synthetic Heavy chain variable region CDR H3 nucleic acid sequence

SEQ ID NO: 4361 - DNA, 336 bp, Artificial Sequence; identical to SEQ ID NO: 4297
  Description of Artificial Sequence: Synthetic Light chain variable region nucleic acid sequence

SEQ ID NO: 4362 - protein, 112 aa, Artificial Sequence; identical to SEQ ID NO: 4298
  Description of Artificial Sequence: Synthetic Light chain variable region amino acid sequence

SEQ ID NO: 4363 - protein, 17 aa, Artificial Sequence
  Description of Artificial Sequence: Synthetic Light chain variable region CDR L1 amino acid sequence
KSSQSLLESRTGKNYLA

SEQ ID NO: 4364 - DNA, 51 bp, Artificial Sequence; identical to SEQ ID NO: 4300
  Description of Artificial Sequence: Synthetic Light chain variable region CDR L1 nucleic acid sequence

SEQ ID NO: 4365 - protein, 7 aa, Artificial Sequence
  Description of Artificial Sequence: Synthetic Light chain variable region CDR L2 amino acid sequence
WASTRES

SEQ ID NO: 4366 - DNA, 21 bp, Artificial Sequence
  Description of Artificial Sequence: Synthetic Light chain variable region CDR L2 nucleic acid sequence
tgggcatctacccgggaatcc

SEQ ID NO: 4367 - protein, 8 aa, Artificial Sequence
  Description of Artificial Sequence: Synthetic Light chain variable region CDR L3 amino acid sequence
KQSYSRRT

SEQ ID NO: 4368 - DNA, 24 bp, Artificial Sequence
  Description of Artificial Sequence: Synthetic Light chain variable region CDR L3 nucleic acid sequence
aagcaatcttattctcggagaact

SEQ ID NO: 4369 - DNA, 357 bp, Artificial Sequence
  Description of Artificial Sequence: Synthetic Heavy chain variable region nucleic acid sequence
caggtgcagctggtgcagtctggggctgaggtgaagaagcctggggcctcagtgaaggtctcctgcaaggcttctggattcaacatcaaggactactatatgcactgggtgcgacaggctcctggacaaaggcttgagtggatgggatggatcgaccttgaagaaggtaacacaatctatgacccgaagtttcagggcagggtcaccataaccagggacacgtccgccagcacagcctacatggagctgagcagcctgagatctgaagacacggcggtgtactactgcgcgagagaaggatacgggagatatttttacgacgtgtggggccaaggaaccctggtcaccgtctcctca

SEQ ID NO: 4370 - protein, 119 aa, Artificial Sequence
  Description of Artificial Sequence: Synthetic Heavy chain variable region amino acid sequence
QVQLVQSGAEVKKPGASVKVSCKASGFNIKDYYMHWVRQAPGQRLEWMGWIDLEEGNTIYDPKFQGRVTITRDTSASTAYMELSSLRSEDTAVYYCAREGYGRYFYDVWGQGTLVTVSS

SEQ ID NO: 4371 - protein, 9 aa, Artificial Sequence
  Description of Artificial Sequence: Synthetic Heavy chain variable region CDR H1 amino acid sequence
FNIKDYYMH

SEQ ID NO: 4372 - DNA, 27 bp, Artificial Sequence
  Description of Artificial Sequence: Synthetic Heavy chain variable region CDR H1 nucleic acid sequence
ttcaacatcaaggactactatatgcac

SEQ ID NO: 4373 - protein, 17 aa, Artificial Sequence
  Description of Artificial Sequence: Synthetic Heavy chain variable region CDR H2 amino acid sequence
WIDLEEGNTIYDPKFQG

SEQ ID NO: 4374 - DNA, 51 bp, Artificial Sequence; identical to SEQ ID NO: 4294
  Description of Artificial Sequence: Synthetic Heavy chain variable region CDR H2 nucleic acid sequence

SEQ ID NO: 4375 - protein, 12 aa, Artificial Sequence
  Description of Artificial Sequence: Synthetic Heavy chain variable region CDR H3 amino acid sequence
AREGYGRYFYDV

SEQ ID NO: 4376 - DNA, 36 bp, Artificial Sequence; identical to SEQ ID NO: 4328
  Description of Artificial Sequence: Synthetic Heavy chain variable region CDR H3 nucleic acid sequence

SEQ ID NO: 4377 - DNA, 336 bp, Artificial Sequence; identical to SEQ ID NO: 4297
  Description of Artificial Sequence: Synthetic Light chain variable region nucleic acid sequence

SEQ ID NO: 4378 - protein, 112 aa, Artificial Sequence; identical to SEQ ID NO: 4298
  Description of Artificial Sequence: Synthetic Light chain variable region amino acid sequence

SEQ ID NO: 4379 - protein, 17 aa, Artificial Sequence
  Description of Artificial Sequence: Synthetic Light chain variable region CDR L1 amino acid sequence
KSSQSLLESRTGKNYLA

SEQ ID NO: 4380 - DNA, 51 bp, Artificial Sequence; identical to SEQ ID NO: 4300
  Description of Artificial Sequence: Synthetic Light chain variable region CDR L1 nucleic acid sequence

SEQ ID NO: 4381 - protein, 7 aa, Artificial Sequence
  Description of Artificial Sequence: Synthetic Light chain variable region CDR L2 amino acid sequence
WASTRES

SEQ ID NO: 4382 - DNA, 21 bp, Artificial Sequence
  Description of Artificial Sequence: Synthetic Light chain variable region CDR L2 nucleic acid sequence
tgggcatctacccgggaatcc

SEQ ID NO: 4383 - protein, 8 aa, Artificial Sequence
  Description of Artificial Sequence: Synthetic Light chain variable region CDR L3 amino acid sequence
KQSYSRRT

SEQ ID NO: 4384 - DNA, 24 bp, Artificial Sequence
  Description of Artificial Sequence: Synthetic Light chain variable region CDR L3 nucleic acid sequence
aagcaatcttattctcggagaact

SEQ ID NO: 4385 - DNA, 357 bp, Artificial Sequence
  Description of Artificial Sequence: Synthetic Heavy chain variable region nucleic acid sequence
caggtgcagctggtgcagtctggggctgaggtgaagaagcctggggcctcagtgaaggtctcctgcaaggcttctggattcaacatcaaggactactatatgcactgggtgcgacaggctcctggacaaaggcttgagtggatgggatggatcgaccttgaagaaggtaacacaatctatcaaccgaagtttcagggcagggtcaccataaccagggacacgtccgccagcacagcctacatggagctgagcagcctgagatctgaagacacggcggtgtactactgcgcgagagaaggatacgggagatatttttacgacgtgtggggccaaggaaccctggtcaccgtctcctca

SEQ ID NO: 4386 - protein, 119 aa, Artificial Sequence
  Description of Artificial Sequence: Synthetic Heavy chain variable region amino acid sequence
QVQLVQSGAEVKKPGASVKVSCKASGFNIKDYYMHWVRQAPGQRLEWMGWIDLEEGNTIYQPKFQGRVTITRDTSASTAYMELSSLRSEDTAVYYCAREGYGRYFYDVWGQGTLVTVSS

SEQ ID NO: 4387 - protein, 9 aa, Artificial Sequence
  Description of Artificial Sequence: Synthetic Heavy chain variable region CDR H1 amino acid sequence
FNIKDYYMH

SEQ ID NO: 4388 - DNA, 27 bp, Artificial Sequence
  Description of Artificial Sequence: Synthetic Heavy chain variable region CDR H1 nucleic acid sequence
ttcaacatcaaggactactatatgcac

SEQ ID NO: 4389 - protein, 17 aa, Artificial Sequence
  Description of Artificial Sequence: Synthetic Heavy chain variable region CDR H2 amino acid sequence
WIDLEEGNTIYQPKFQG

SEQ ID NO: 4390 - DNA, 51 bp, Artificial Sequence; identical to SEQ ID NO: 4342
  Description of Artificial Sequence: Synthetic Heavy chain variable region CDR H2 nucleic acid sequence

SEQ ID NO: 4391 - protein, 12 aa, Artificial Sequence
  Description of Artificial Sequence: Synthetic Heavy chain variable region CDR H3 amino acid sequence
AREGYGRYFYDV

SEQ ID NO: 4392 - DNA, 36 bp, Artificial Sequence; identical to SEQ ID NO: 4328
  Description of Artificial Sequence: Synthetic Heavy chain variable region CDR H3 nucleic acid sequence

SEQ ID NO: 4393 - DNA, 336 bp, Artificial Sequence; identical to SEQ ID NO: 4297
  Description of Artificial Sequence: Synthetic Light chain variable region nucleic acid sequence

SEQ ID NO: 4394 - protein, 112 aa, Artificial Sequence; identical to SEQ ID NO: 4298
  Description of Artificial Sequence: Synthetic Light chain variable region amino acid sequence

SEQ ID NO: 4395 - protein, 17 aa, Artificial Sequence
  Description of Artificial Sequence: Synthetic Light chain variable region CDR L1 amino acid sequence
KSSQSLLESRTGKNYLA

SEQ ID NO: 4396 - DNA, 51 bp, Artificial Sequence; identical to SEQ ID NO: 4300
  Description of Artificial Sequence: Synthetic Light chain variable region CDR L1 nucleic acid sequence

SEQ ID NO: 4397 - protein, 7 aa, Artificial Sequence
  Description of Artificial Sequence: Synthetic Light chain variable region CDR L2 amino acid sequence
WASTRES

SEQ ID NO: 4398 - DNA, 21 bp, Artificial Sequence
  Description of Artificial Sequence: Synthetic Light chain variable region CDR L2 nucleic acid sequence
tgggcatctacccgggaatcc

SEQ ID NO: 4399 - protein, 8 aa, Artificial Sequence
  Description of Artificial Sequence: Synthetic Light chain variable region CDR L3 amino acid sequence
KQSYSRRT

SEQ ID NO: 4400 - DNA, 24 bp, Artificial Sequence
  Description of Artificial Sequence: Synthetic Light chain variable region CDR L3 nucleic acid sequence
aagcaatcttattctcggagaact

SEQ ID NO: 4401 - DNA, 357 bp, Artificial Sequence; identical to SEQ ID NO: 4161
  Description of Artificial Sequence: Synthetic Heavy chain variable region nucleic acid sequence

SEQ ID NO: 4402 - protein, 119 aa, Artificial Sequence; identical to SEQ ID NO: 4162
  Description of Artificial Sequence: Synthetic Heavy chain variable region amino acid sequence

SEQ ID NO: 4403 - protein, 9 aa, Artificial Sequence
  Description of Artificial Sequence: Synthetic Heavy chain variable region CDR H1 amino acid sequence
FNIKDYYMH

SEQ ID NO: 4404 - DNA, 27 bp, Artificial Sequence
  Description of Artificial Sequence: Synthetic Heavy chain variable region CDR H1 nucleic acid sequence
ttcaacatcaaggactactatatgcac

SEQ ID NO: 4405 - protein, 17 aa, Artificial Sequence
  Description of Artificial Sequence: Synthetic Heavy chain variable region CDR H2 amino acid sequence
WIDLENGNTIYDPKFQG

SEQ ID NO: 4406 - DNA, 51 bp, Artificial Sequence; identical to SEQ ID NO: 3574
  Description of Artificial Sequence: Synthetic Heavy chain variable region CDR H2 nucleic acid sequence

SEQ ID NO: 4407 - protein, 12 aa, Artificial Sequence
  Description of Artificial Sequence: Synthetic Heavy chain variable region CDR H3 amino acid sequence
ARDGYGRYFYDV

SEQ ID NO: 4408 - DNA, 36 bp, Artificial Sequence; identical to SEQ ID NO: 4168
  Description of Artificial Sequence: Synthetic Heavy chain variable region CDR H3 nucleic acid sequence

SEQ ID NO: 4409 - DNA, 336 bp, Artificial Sequence; identical to SEQ ID NO: 4297
  Description of Artificial Sequence: Synthetic Light chain variable region nucleic acid sequence

SEQ ID NO: 4410 - protein, 112 aa, Artificial Sequence; identical to SEQ ID NO: 4298
  Description of Artificial Sequence: Synthetic Light chain variable region amino acid sequence

SEQ ID NO: 4411 - protein, 17 aa, Artificial Sequence
  Description of Artificial Sequence: Synthetic Light chain variable region CDR L1 amino acid sequence
KSSQSLLESRTGKNYLA

SEQ ID NO: 4412 - DNA, 51 bp, Artificial Sequence; identical to SEQ ID NO: 4300
  Description of Artificial Sequence: Synthetic Light chain variable region CDR L1 nucleic acid sequence

SEQ ID NO: 4413 - protein, 7 aa, Artificial Sequence
  Description of Artificial Sequence: Synthetic Light chain variable region CDR L2 amino acid sequence
WASTRES

SEQ ID NO: 4414 - DNA, 21 bp, Artificial Sequence
  Description of Artificial Sequence: Synthetic Light chain variable region CDR L2 nucleic acid sequence
tgggcatctacccgggaatcc

SEQ ID NO: 4415 - protein, 8 aa, Artificial Sequence
  Description of Artificial Sequence: Synthetic Light chain variable region CDR L3 amino acid sequence
KQSYSRRT

SEQ ID NO: 4416 - DNA, 24 bp, Artificial Sequence
  Description of Artificial Sequence: Synthetic Light chain variable region CDR L3 nucleic acid sequence
aagcaatcttattctcggagaact

SEQ ID NO: 4417 - DNA, 357 bp, Artificial Sequence; identical to SEQ ID NO: 4289
  Description of Artificial Sequence: Synthetic Heavy chain variable region nucleic acid sequence

SEQ ID NO: 4418 - protein, 119 aa, Artificial Sequence; identical to SEQ ID NO: 4290
  Description of Artificial Sequence: Synthetic Heavy chain variable region amino acid sequence

SEQ ID NO: 4419 - protein, 9 aa, Artificial Sequence
  Description of Artificial Sequence: Synthetic Heavy chain variable region CDR H1 amino acid sequence
FNIKDYYMH

SEQ ID NO: 4420 - DNA, 27 bp, Artificial Sequence
  Description of Artificial Sequence: Synthetic Heavy chain variable region CDR H1 nucleic acid sequence
ttcaacatcaaggactactatatgcac

SEQ ID NO: 4421 - protein, 17 aa, Artificial Sequence
  Description of Artificial Sequence: Synthetic Heavy chain variable region CDR H2 amino acid sequence
WIDLEEGNTIYDPKFQG

SEQ ID NO: 4422 - DNA, 51 bp, Artificial Sequence; identical to SEQ ID NO: 4294
  Description of Artificial Sequence: Synthetic Heavy chain variable region CDR H2 nucleic acid sequence

SEQ ID NO: 4423 - protein, 12 aa, Artificial Sequence
  Description of Artificial Sequence: Synthetic Heavy chain variable region CDR H3 amino acid sequence
ARDGYGRYFYDV

SEQ ID NO: 4424 - DNA, 36 bp, Artificial Sequence; identical to SEQ ID NO: 4168
  Description of Artificial Sequence: Synthetic Heavy chain variable region CDR H3 nucleic acid sequence

SEQ ID NO: 4425 - DNA, 336 bp, Artificial Sequence; identical to SEQ ID NO: 3865
  Description of Artificial Sequence: Synthetic Light chain variable region nucleic acid sequence

SEQ ID NO: 4426 - protein, 112 aa, Artificial Sequence; identical to SEQ ID NO: 3866
  Description of Artificial Sequence: Synthetic Light chain variable region amino acid sequence

SEQ ID NO: 4427 - protein, 17 aa, Artificial Sequence
  Description of Artificial Sequence: Synthetic Light chain variable region CDR L1 amino acid sequence
KSSQSLLNSRTGKNYLA

SEQ ID NO: 4428 - DNA, 51 bp, Artificial Sequence; identical to SEQ ID NO: 3868
  Description of Artificial Sequence: Synthetic Light chain variable region CDR L1 nucleic acid sequence

SEQ ID NO: 4429 - protein, 7 aa, Artificial Sequence
  Description of Artificial Sequence: Synthetic Light chain variable region CDR L2 amino acid sequence
WASTRES

SEQ ID NO: 4430 - DNA, 21 bp, Artificial Sequence
  Description of Artificial Sequence: Synthetic Light chain variable region CDR L2 nucleic acid sequence
tgggcatctacccgggaatcc

SEQ ID NO: 4431 - protein, 8 aa, Artificial Sequence
  Description of Artificial Sequence: Synthetic Light chain variable region CDR L3 amino acid sequence
KQSYSRRT

SEQ ID NO: 4432 - DNA, 24 bp, Artificial Sequence
  Description of Artificial Sequence: Synthetic Light chain variable region CDR L3 nucleic acid sequence
aagcaatcttattctcggagaact

SEQ ID NO: 4433 - DNA, 357 bp, Artificial Sequence; identical to SEQ ID NO: 4305
  Description of Artificial Sequence: Synthetic Heavy chain variable region nucleic acid sequence

SEQ ID NO: 4434 - protein, 119 aa, Artificial Sequence; identical to SEQ ID NO: 4306
  Description of Artificial Sequence: Synthetic Heavy chain variable region amino acid sequence

SEQ ID NO: 4435 - protein, 9 aa, Artificial Sequence
  Description of Artificial Sequence: Synthetic Heavy chain variable region CDR H1 amino acid sequence
FNIKDYYMH

SEQ ID NO: 4436 - DNA, 27 bp, Artificial Sequence
  Description of Artificial Sequence: Synthetic Heavy chain variable region CDR H1 nucleic acid sequence
ttcaacatcaaggactactatatgcac

SEQ ID NO: 4437 - protein, 17 aa, Artificial Sequence
  Description of Artificial Sequence: Synthetic Heavy chain variable region CDR H2 amino acid sequence
WIDLENGNTIYQPKFQG

SEQ ID NO: 4438 - DNA, 51 bp, Artificial Sequence; identical to SEQ ID NO: 4310
  Description of Artificial Sequence: Synthetic Heavy chain variable region CDR H2 nucleic acid sequence

SEQ ID NO: 4439 - protein, 12 aa, Artificial Sequence
  Description of Artificial Sequence: Synthetic Heavy chain variable region CDR H3 amino acid sequence
ARDGYGRYFYDV

SEQ ID NO: 4440 - DNA, 36 bp, Artificial Sequence; identical to SEQ ID NO: 4168
  Description of Artificial Sequence: Synthetic Heavy chain variable region CDR H3 nucleic acid sequence

SEQ ID NO: 4441 - DNA, 336 bp, Artificial Sequence; identical to SEQ ID NO: 3865
  Description of Artificial Sequence: Synthetic Light chain variable region nucleic acid sequence

SEQ ID NO: 4442 - protein, 112 aa, Artificial Sequence; identical to SEQ ID NO: 3866
  Description of Artificial Sequence: Synthetic Light chain variable region amino acid sequence

SEQ ID NO: 4443 - protein, 17 aa, Artificial Sequence
  Description of Artificial Sequence: Synthetic Light chain variable region CDR L1 amino acid sequence
KSSQSLLNSRTGKNYLA

SEQ ID NO: 4444 - DNA, 51 bp, Artificial Sequence; identical to SEQ ID NO: 3868
  Description of Artificial Sequence: Synthetic Light chain variable region CDR L1 nucleic acid sequence

SEQ ID NO: 4445 - protein, 7 aa, Artificial Sequence
  Description of Artificial Sequence: Synthetic Light chain variable region CDR L2 amino acid sequence
WASTRES

SEQ ID NO: 4446 - DNA, 21 bp, Artificial Sequence
  Description of Artificial Sequence: Synthetic Light chain variable region CDR L2 nucleic acid sequence
tgggcatctacccgggaatcc

SEQ ID NO: 4447 - protein, 8 aa, Artificial Sequence
  Description of Artificial Sequence: Synthetic Light chain variable region CDR L3 amino acid sequence
KQSYSRRT

SEQ ID NO: 4448 - DNA, 24 bp, Artificial Sequence
  Description of Artificial Sequence: Synthetic Light chain variable region CDR L3 nucleic acid sequence
aagcaatcttattctcggagaact

SEQ ID NO: 4449 - DNA, 357 bp, Artificial Sequence; identical to SEQ ID NO: 4321
  Description of Artificial Sequence: Synthetic Heavy chain variable region nucleic acid sequence

SEQ ID NO: 4450 - protein, 119 aa, Artificial Sequence; identical to SEQ ID NO: 4322
  Description of Artificial Sequence: Synthetic Heavy chain variable region amino acid sequence

SEQ ID NO: 4451 - protein, 9 aa, Artificial Sequence
  Description of Artificial Sequence: Synthetic Heavy chain variable region CDR H1 amino acid sequence
FNIKDYYMH

SEQ ID NO: 4452 - DNA, 27 bp, Artificial Sequence
  Description of Artificial Sequence: Synthetic Heavy chain variable region CDR H1 nucleic acid sequence
ttcaacatcaaggactactatatgcac

SEQ ID NO: 4453 - protein, 17 aa, Artificial Sequence
  Description of Artificial Sequence: Synthetic Heavy chain variable region CDR H2 amino acid sequence
WIDLENGNTIYDPKFQG

SEQ ID NO: 4454 - DNA, 51 bp, Artificial Sequence; identical to SEQ ID NO: 3574
  Description of Artificial Sequence: Synthetic Heavy chain variable region CDR H2 nucleic acid sequence

SEQ ID NO: 4455 - protein, 12 aa, Artificial Sequence
  Description of Artificial Sequence: Synthetic Heavy chain variable region CDR H3 amino acid sequence
AREGYGRYFYDV

SEQ ID NO: 4456 - DNA, 36 bp, Artificial Sequence; identical to SEQ ID NO: 4328
  Description of Artificial Sequence: Synthetic Heavy chain variable region CDR H3 nucleic acid sequence

SEQ ID NO: 4457 - DNA, 336 bp, Artificial Sequence; identical to SEQ ID NO: 3865
  Description of Artificial Sequence: Synthetic Light chain variable region nucleic acid sequence

SEQ ID NO: 4458 - protein, 112 aa, Artificial Sequence; identical to SEQ ID NO: 3866
  Description of Artificial Sequence: Synthetic Light chain variable region amino acid sequence

SEQ ID NO: 4459 - protein, 17 aa, Artificial Sequence
  Description of Artificial Sequence: Synthetic Light chain variable region CDR L1 amino acid sequence
KSSQSLLNSRTGKNYLA

SEQ ID NO: 4460 - DNA, 51 bp, Artificial Sequence; identical to SEQ ID NO: 3868
  Description of Artificial Sequence: Synthetic Light chain variable region CDR L1 nucleic acid sequence

SEQ ID NO: 4461 - protein, 7 aa, Artificial Sequence
  Description of Artificial Sequence: Synthetic Light chain variable region CDR L2 amino acid sequence
WASTRES

SEQ ID NO: 4462 - DNA, 21 bp, Artificial Sequence
  Description of Artificial Sequence: Synthetic Light chain variable region CDR L2 nucleic acid sequence
tgggcatctacccgggaatcc

SEQ ID NO: 4463 - protein, 8 aa, Artificial Sequence
  Description of Artificial Sequence: Synthetic Light chain variable region CDR L3 amino acid sequence
KQSYSRRT

SEQ ID NO: 4464 - DNA, 24 bp, Artificial Sequence
  Description of Artificial Sequence: Synthetic Light chain variable region CDR L3 nucleic acid sequence
aagcaatcttattctcggagaact

SEQ ID NO: 4465 - DNA, 357 bp, Artificial Sequence; identical to SEQ ID NO: 4337
  Description of Artificial Sequence: Synthetic Heavy chain variable region nucleic acid sequence

SEQ ID NO: 4466 - protein, 119 aa, Artificial Sequence; identical to SEQ ID NO: 4338
  Description of Artificial Sequence: Synthetic Heavy chain variable region amino acid sequence

SEQ ID NO: 4467 - protein, 9 aa, Artificial Sequence
  Description of Artificial Sequence: Synthetic Heavy chain variable region CDR H1 amino acid sequence
FNIKDYYMH

SEQ ID NO: 4468 - DNA, 27 bp, Artificial Sequence
  Description of Artificial Sequence: Synthetic Heavy chain variable region CDR H1 nucleic acid sequence
ttcaacatcaaggactactatatgcac

SEQ ID NO: 4469 - protein, 17 aa, Artificial Sequence
  Description of Artificial Sequence: Synthetic Heavy chain variable region CDR H2 amino acid sequence
WIDLEEGNTIYQPKFQG

SEQ ID NO: 4470 - DNA, 51 bp, Artificial Sequence; identical to SEQ ID NO: 4342
  Description of Artificial Sequence: Synthetic Heavy chain variable region CDR H2 nucleic acid sequence

SEQ ID NO: 4471 - protein, 12 aa, Artificial Sequence
  Description of Artificial Sequence: Synthetic Heavy chain variable region CDR H3 amino acid sequence
ARDGYGRYFYDV

SEQ ID NO: 4472 - DNA, 36 bp, Artificial Sequence; identical to SEQ ID NO: 4168
  Description of Artificial Sequence: Synthetic Heavy chain variable region CDR H3 nucleic acid sequence

SEQ ID NO: 4473 - DNA, 336 bp, Artificial Sequence; identical to SEQ ID NO: 3865
  Description of Artificial Sequence: Synthetic Light chain variable region nucleic acid sequence

SEQ ID NO: 4474 - protein, 112 aa, Artificial Sequence; identical to SEQ ID NO: 3866
  Description of Artificial Sequence: Synthetic Light chain variable region amino acid sequence

SEQ ID NO: 4475 - protein, 17 aa, Artificial Sequence
  Description of Artificial Sequence: Synthetic Light chain variable region CDR L1 amino acid sequence
KSSQSLLNSRTGKNYLA

SEQ ID NO: 4476 - DNA, 51 bp, Artificial Sequence; identical to SEQ ID NO: 3868
  Description of Artificial Sequence: Synthetic Light chain variable region CDR L1 nucleic acid sequence

SEQ ID NO: 4477 - protein, 7 aa, Artificial Sequence
  Description of Artificial Sequence: Synthetic Light chain variable region CDR L2 amino acid sequence
WASTRES

SEQ ID NO: 4478 - DNA, 21 bp, Artificial Sequence
  Description of Artificial Sequence: Synthetic Light chain variable region CDR L2 nucleic acid sequence
tgggcatctacccgggaatcc

SEQ ID NO: 4479 - protein, 8 aa, Artificial Sequence
  Description of Artificial Sequence: Synthetic Light chain variable region CDR L3 amino acid sequence
KQSYSRRT

SEQ ID NO: 4480 - DNA, 24 bp, Artificial Sequence
  Description of Artificial Sequence: Synthetic Light chain variable region CDR L3 nucleic acid sequence
aagcaatcttattctcggagaact

SEQ ID NO: 4481 - DNA, 357 bp, Artificial Sequence; identical to SEQ ID NO: 4353
  Description of Artificial Sequence: Synthetic Heavy chain variable region nucleic acid sequence

SEQ ID NO: 4482 - protein, 119 aa, Artificial Sequence; identical to SEQ ID NO: 4354
  Description of Artificial Sequence: Synthetic Heavy chain variable region amino acid sequence

SEQ ID NO: 4483 - protein, 9 aa, Artificial Sequence
  Description of Artificial Sequence: Synthetic Heavy chain variable region CDR H1 amino acid sequence
FNIKDYYMH

SEQ ID NO: 4484 - DNA, 27 bp, Artificial Sequence
  Description of Artificial Sequence: Synthetic Heavy chain variable region CDR H1 nucleic acid sequence
ttcaacatcaaggactactatatgcac

SEQ ID NO: 4485 - protein, 17 aa, Artificial Sequence
  Description of Artificial Sequence: Synthetic Heavy chain variable region CDR H2 amino acid sequence
WIDLENGNTIYQPKFQG

SEQ ID NO: 4486 - DNA, 51 bp, Artificial Sequence; identical to SEQ ID NO: 4310
  Description of Artificial Sequence: Synthetic Heavy chain variable region CDR H2 nucleic acid sequence

SEQ ID NO: 4487 - protein, 12 aa, Artificial Sequence
  Description of Artificial Sequence: Synthetic Heavy chain variable region CDR H3 amino acid sequence
AREGYGRYFYDV

SEQ ID NO: 4488 - DNA, 36 bp, Artificial Sequence; identical to SEQ ID NO: 4328
  Description of Artificial Sequence: Synthetic Heavy chain variable region CDR H3 nucleic acid sequence

SEQ ID NO: 4489 - DNA, 336 bp, Artificial Sequence; identical to SEQ ID NO: 3865
  Description of Artificial Sequence: Synthetic Light chain variable region nucleic acid sequence

SEQ ID NO: 4490 - protein, 112 aa, Artificial Sequence; identical to SEQ ID NO: 3866
  Description of Artificial Sequence: Synthetic Light chain variable region amino acid sequence

SEQ ID NO: 4491 - protein, 17 aa, Artificial Sequence
  Description of Artificial Sequence: Synthetic Light chain variable region CDR L1 amino acid sequence
KSSQSLLNSRTGKNYLA

SEQ ID NO: 4492 - DNA, 51 bp, Artificial Sequence; identical to SEQ ID NO: 3868
  Description of Artificial Sequence: Synthetic Light chain variable region CDR L1 nucleic acid sequence

SEQ ID NO: 4493 - protein, 7 aa, Artificial Sequence
  Description of Artificial Sequence: Synthetic Light chain variable region CDR L2 amino acid sequence
WASTRES

SEQ ID NO: 4494 - DNA, 21 bp, Artificial Sequence
  Description of Artificial Sequence: Synthetic Light chain variable region CDR L2 nucleic acid sequence
tgggcatctacccgggaatcc

SEQ ID NO: 4495 - protein, 8 aa, Artificial Sequence
  Description of Artificial Sequence: Synthetic Light chain variable region CDR L3 amino acid sequence
KQSYSRRT

SEQ ID NO: 4496 - DNA, 24 bp, Artificial Sequence
  Description of Artificial Sequence: Synthetic Light chain variable region CDR L3 nucleic acid sequence
aagcaatcttattctcggagaact

SEQ ID NO: 4497 - DNA, 357 bp, Artificial Sequence; identical to SEQ ID NO: 4369
  Description of Artificial Sequence: Synthetic Heavy chain variable region nucleic acid sequence

SEQ ID NO: 4498 - protein, 119 aa, Artificial Sequence; identical to SEQ ID NO: 4370
  Description of Artificial Sequence: Synthetic Heavy chain variable region amino acid sequence

SEQ ID NO: 4499 - protein, 9 aa, Artificial Sequence
  Description of Artificial Sequence: Synthetic Heavy chain variable region CDR H1 amino acid sequence
FNIKDYYMH

SEQ ID NO: 4500 - DNA, 27 bp, Artificial Sequence
  Description of Artificial Sequence: Synthetic Heavy chain variable region CDR H1 nucleic acid sequence
ttcaacatcaaggactactatatgcac

SEQ ID NO: 4501 - protein, 17 aa, Artificial Sequence
  Description of Artificial Sequence: Synthetic Heavy chain variable region CDR H2 amino acid sequence
WIDLEEGNTIYDPKFQG

SEQ ID NO: 4502 - DNA, 51 bp, Artificial Sequence; identical to SEQ ID NO: 4294
  Description of Artificial Sequence: Synthetic Heavy chain variable region CDR H2 nucleic acid sequence

SEQ ID NO: 4503 - protein, 12 aa, Artificial Sequence
  Description of Artificial Sequence: Synthetic Heavy chain variable region CDR H3 amino acid sequence
AREGYGRYFYDV

SEQ ID NO: 4504 - DNA, 36 bp, Artificial Sequence; identical to SEQ ID NO: 4328
  Description of Artificial Sequence: Synthetic Heavy chain variable region CDR H3 nucleic acid sequence

SEQ ID NO: 4505 - DNA, 336 bp, Artificial Sequence; identical to SEQ ID NO: 3865
  Description of Artificial Sequence: Synthetic Light chain variable region nucleic acid sequence

SEQ ID NO: 4506 - protein, 112 aa, Artificial Sequence; identical to SEQ ID NO: 3866
  Description of Artificial Sequence: Synthetic Light chain variable region amino acid sequence

SEQ ID NO: 4507 - protein, 17 aa, Artificial Sequence
  Description of Artificial Sequence: Synthetic Light chain variable region CDR L1 amino acid sequence
KSSQSLLNSRTGKNYLA

SEQ ID NO: 4508 - DNA, 51 bp, Artificial Sequence; identical to SEQ ID NO: 3868
  Description of Artificial Sequence: Synthetic Light chain variable region CDR L1 nucleic acid sequence

SEQ ID NO: 4509 - protein, 7 aa, Artificial Sequence
  Description of Artificial Sequence: Synthetic Light chain variable region CDR L2 amino acid sequence
WASTRES

SEQ ID NO: 4510 - DNA, 21 bp, Artificial Sequence
  Description of Artificial Sequence: Synthetic Light chain variable region CDR L2 nucleic acid sequence
tgggcatctacccgggaatcc

SEQ ID NO: 4511 - protein, 8 aa, Artificial Sequence
  Description of Artificial Sequence: Synthetic Light chain variable region CDR L3 amino acid sequence
KQSYSRRT

SEQ ID NO: 4512 - DNA, 24 bp, Artificial Sequence
  Description of Artificial Sequence: Synthetic Light chain variable region CDR L3 nucleic acid sequence
aagcaatcttattctcggagaact

SEQ ID NO: 4513 - DNA, 357 bp, Artificial Sequence; identical to SEQ ID NO: 4385
  Description of Artificial Sequence: Synthetic Heavy chain variable region nucleic acid sequence

SEQ ID NO: 4514 - protein, 119 aa, Artificial Sequence; identical to SEQ ID NO: 4386
  Description of Artificial Sequence: Synthetic Heavy chain variable region amino acid sequence

SEQ ID NO: 4515 - protein, 9 aa, Artificial Sequence
  Description of Artificial Sequence: Synthetic Heavy chain variable region CDR H1 amino acid sequence
FNIKDYYMH

SEQ ID NO: 4516 - DNA, 27 bp, Artificial Sequence
  Description of Artificial Sequence: Synthetic Heavy chain variable region CDR H1 nucleic acid sequence
ttcaacatcaaggactactatatgcac

SEQ ID NO: 4517 - protein, 17 aa, Artificial Sequence
  Description of Artificial Sequence: Synthetic Heavy chain variable region CDR H2 amino acid sequence
WIDLEEGNTIYQPKFQG

SEQ ID NO: 4518 - DNA, 51 bp, Artificial Sequence; identical to SEQ ID NO: 4342
  Description of Artificial Sequence: Synthetic Heavy chain variable region CDR H2 nucleic acid sequence

SEQ ID NO: 4519 - protein, 12 aa, Artificial Sequence
  Description of Artificial Sequence: Synthetic Heavy chain variable region CDR H3 amino acid sequence
AREGYGRYFYDV

SEQ ID NO: 4520 - DNA, 36 bp, Artificial Sequence; identical to SEQ ID NO: 4328
  Description of Artificial Sequence: Synthetic Heavy chain variable region CDR H3 nucleic acid sequence

SEQ ID NO: 4521 - DNA, 336 bp, Artificial Sequence; identical to SEQ ID NO: 3865
  Description of Artificial Sequence: Synthetic Light chain variable region nucleic acid sequence

SEQ ID NO: 4522 - protein, 112 aa, Artificial Sequence; identical to SEQ ID NO: 3866
  Description of Artificial Sequence: Synthetic Light chain variable region amino acid sequence

SEQ ID NO: 4523 - protein, 17 aa, Artificial Sequence
  Description of Artificial Sequence: Synthetic Light chain variable region CDR L1 amino acid sequence
KSSQSLLNSRTGKNYLA

SEQ ID NO: 4524 - DNA, 51 bp, Artificial Sequence; identical to SEQ ID NO: 3868
  Description of Artificial Sequence: Synthetic Light chain variable region CDR L1 nucleic acid sequence

SEQ ID NO: 4525 - protein, 7 aa, Artificial Sequence
  Description of Artificial Sequence: Synthetic Light chain variable region CDR L2 amino acid sequence
WASTRES

SEQ ID NO: 4526 - DNA, 21 bp, Artificial Sequence
  Description of Artificial Sequence: Synthetic Light chain variable region CDR L2 nucleic acid sequence
tgggcatctacccgggaatcc

SEQ ID NO: 4527 - protein, 8 aa, Artificial Sequence
  Description of Artificial Sequence: Synthetic Light chain variable region CDR L3 amino acid sequence
KQSYSRRT

SEQ ID NO: 4528 - DNA, 24 bp, Artificial Sequence
  Description of Artificial Sequence: Synthetic Light chain variable region CDR L3 nucleic acid sequence
aagcaatcttattctcggagaact

SEQ ID NO: 4529 - DNA, 357 bp, Artificial Sequence
  Description of Artificial Sequence: Synthetic Heavy chain variable region nucleic acid sequence
caggtgcagctggtgcagtctggggctgaggtgaagaagcctggggcctcagtgaaggtctcctgcaaggcttctggattcaacatcaaggactactatatgcactgggtgcgacaggctcctggacaaaggcttgagtggatgggatggatcgaccttgaaaatgctaacacaatctatgacccgaagtttcagggcagggtcaccataaccagggacacgtccgccagcacagcctacatggagctgagcagcctgagatctgaagacacggcggtgtactactgcgcgagagatggatacgggagatatttttacgacgtgtggggccaaggaaccctggtcaccgtctcctca

SEQ ID NO: 4530 - protein, 119 aa, Artificial Sequence
  Description of Artificial Sequence: Synthetic Heavy chain variable region amino acid sequence
QVQLVQSGAEVKKPGASVKVSCKASGFNIKDYYMHWVRQAPGQRLEWMGWIDLENANTIYDPKFQGRVTITRDTSASTAYMELSSLRSEDTAVYYCARDGYGRYFYDVWGQGTLVTVSS

SEQ ID NO: 4531 - protein, 9 aa, Artificial Sequence
  Description of Artificial Sequence: Synthetic Heavy chain variable region CDR H1 amino acid sequence
FNIKDYYMH

SEQ ID NO: 4532 - DNA, 27 bp, Artificial Sequence
  Description of Artificial Sequence: Synthetic Heavy chain variable region CDR H1 nucleic acid sequence
ttcaacatcaaggactactatatgcac

SEQ ID NO: 4533 - protein, 17 aa, Artificial Sequence
  Description of Artificial Sequence: Synthetic Heavy chain variable region CDR H2 amino acid sequence
WIDLENANTIYDPKFQG

SEQ ID NO: 4534 - DNA, 51 bp, Artificial Sequence
  Description of Artificial Sequence: Synthetic Heavy chain variable region CDR H2 nucleic acid sequence
tggatcgaccttgaaaatgctaacacaatctatgacccgaagtttcagggc

SEQ ID NO: 4535 - protein, 12 aa, Artificial Sequence
  Description of Artificial Sequence: Synthetic Heavy chain variable region CDR H3 amino acid sequence
ARDGYGRYFYDV

SEQ ID NO: 4536 - DNA, 36 bp, Artificial Sequence; identical to SEQ ID NO: 4168
  Description of Artificial Sequence: Synthetic Heavy chain variable region CDR H3 nucleic acid sequence

SEQ ID NO: 4537 - DNA, 336 bp, Artificial Sequence
  Description of Artificial Sequence: Synthetic Light chain variable region nucleic acid sequence
gacatcgtgatgacccagtctccagactccctggctgtgtctctgggcgagagggccaccatcaactgcaagtccagccagagtcttttaaacgctagaaccggaaagaactacttagcttggtaccagcagaaaccaggacagcctcctaagctgctcatttactgggcatctacccgggaatccggggtccctgaccgattcagtggcagcgggtctgggacagacttcactctcactatcagtagcctgcaggctgaagatgtggcagtttattactgtaagcaatcttattctcggagaactttcggcggagggaccaaggtcgagatcaaa

SEQ ID NO: 4538 - protein, 112 aa, Artificial Sequence
  Description of Artificial Sequence: Synthetic Light chain variable region amino acid sequence
DIVMTQSPDSLAVSLGERATINCKSSQSLLNARTGKNYLAWYQQKPGQPPKLLIYWASTRESGVPDRFSGSGSGTDFTLTISSLQAEDVAVYYCKQSYSRRTFGGGTKVEIK

SEQ ID NO: 4539 - protein, 17 aa, Artificial Sequence
  Description of Artificial Sequence: Synthetic Light chain variable region CDR L1 amino acid sequence
KSSQSLLNARTGKNYLA

SEQ ID NO: 4540 - DNA, 51 bp, Artificial Sequence
  Description of Artificial Sequence: Synthetic Light chain variable region CDR L1 nucleic acid sequence
aagtccagccagagtcttttaaacgctagaaccggaaagaactacttagct

SEQ ID NO: 4541 - protein, 7 aa, Artificial Sequence
  Description of Artificial Sequence: Synthetic Light chain variable region CDR L2 amino acid sequence
WASTRES

SEQ ID NO: 4542 - DNA, 21 bp, Artificial Sequence
  Description of Artificial Sequence: Synthetic Light chain variable region CDR L2 nucleic acid sequence
tgggcatctacccgggaatcc

SEQ ID NO: 4543 - protein, 8 aa, Artificial Sequence
  Description of Artificial Sequence: Synthetic Light chain variable region CDR L3 amino acid sequence
KQSYSRRT

SEQ ID NO: 4544 - DNA, 24 bp, Artificial Sequence
  Description of Artificial Sequence: Synthetic Light chain variable region CDR L3 nucleic acid sequence
aagcaatcttattctcggagaact

SEQ ID NO: 4545 - DNA, 357 bp, Artificial Sequence
  Description of Artificial Sequence: Synthetic Heavy chain variable region nucleic acid sequence
caggtgcagctggtgcagtctggggctgaggtgaagaagcctggggcctcagtgaaggtctcctgcaaggcttctggattcaacatcaaggactactatatgcactgggtgcgacaggctcctggacaaaggcttgagtggatgggatggatcgaccttgaaaatggtaacacaatctatgacgctaagtttcagggcagggtcaccataaccagggacacgtccgccagcacagcctacatggagctgagcagcctgagatctgaagacacggcggtgtactactgcgcgagagatggatacgggagatatttttacgacgtgtggggccaaggaaccctggtcaccgtctcctca

SEQ ID NO: 4546 - protein, 119 aa, Artificial Sequence
  Description of Artificial Sequence: Synthetic Heavy chain variable region amino acid sequence
QVQLVQSGAEVKKPGASVKVSCKASGFNIKDYYMHWVRQAPGQRLEWMGWIDLENGNTIYDAKFQGRVTITRDTSASTAYMELSSLRSEDTAVYYCARDGYGRYFYDVWGQGTLVTVSS

SEQ ID NO: 4547 - protein, 9 aa, Artificial Sequence
  Description of Artificial Sequence: Synthetic Heavy chain variable region CDR H1 amino acid sequence
FNIKDYYMH

SEQ ID NO: 4548 - DNA, 27 bp, Artificial Sequence
  Description of Artificial Sequence: Synthetic Heavy chain variable region CDR H1 nucleic acid sequence
ttcaacatcaaggactactatatgcac

SEQ ID NO: 4549 - protein, 17 aa, Artificial Sequence
  Description of Artificial Sequence: Synthetic Heavy chain variable region CDR H2 amino acid sequence
WIDLENGNTIYDAKFQG

SEQ ID NO: 4550 - DNA, 51 bp, Artificial Sequence
  Description of Artificial Sequence: Synthetic Heavy chain variable region CDR H2 nucleic acid sequence
tggatcgaccttgaaaatggtaacacaatctatgacgctaagtttcagggc

SEQ ID NO: 4551 - protein, 12 aa, Artificial Sequence
  Description of Artificial Sequence: Synthetic Heavy chain variable region CDR H3 amino acid sequence
ARDGYGRYFYDV

SEQ ID NO: 4552 - DNA, 36 bp, Artificial Sequence; identical to SEQ ID NO: 4168
  Description of Artificial Sequence: Synthetic Heavy chain variable region CDR H3 nucleic acid sequence

SEQ ID NO: 4553 - DNA, 336 bp, Artificial Sequence; identical to SEQ ID NO: 4537
  Description of Artificial Sequence: Synthetic Light chain variable region nucleic acid sequence

SEQ ID NO: 4554 - protein, 112 aa, Artificial Sequence; identical to SEQ ID NO: 4538
  Description of Artificial Sequence: Synthetic Light chain variable region amino acid sequence

SEQ ID NO: 4555 - protein, 17 aa, Artificial Sequence
  Description of Artificial Sequence: Synthetic Light chain variable region CDR L1 amino acid sequence
KSSQSLLNARTGKNYLA

SEQ ID NO: 4556 - DNA, 51 bp, Artificial Sequence; identical to SEQ ID NO: 4540
  Description of Artificial Sequence: Synthetic Light chain variable region CDR L1 nucleic acid sequence

SEQ ID NO: 4557 - protein, 7 aa, Artificial Sequence
  Description of Artificial Sequence: Synthetic Light chain variable region CDR L2 amino acid sequence
WASTRES

SEQ ID NO: 4558 - DNA, 21 bp, Artificial Sequence
  Description of Artificial Sequence: Synthetic Light chain variable region CDR L2 nucleic acid sequence
tgggcatctacccgggaatcc

SEQ ID NO: 4559 - protein, 8 aa, Artificial Sequence
  Description of Artificial Sequence: Synthetic Light chain variable region CDR L3 amino acid sequence
KQSYSRRT

SEQ ID NO: 4560 - DNA, 24 bp, Artificial Sequence
  Description of Artificial Sequence: Synthetic Light chain variable region CDR L3 nucleic acid sequence
aagcaatcttattctcggagaact

SEQ ID NO: 4561 - DNA, 357 bp, Artificial Sequence
  Description of Artificial Sequence: Synthetic Heavy chain variable region nucleic acid sequence
caggtgcagctggtgcagtctggggctgaggtgaagaagcctggggcctcagtgaaggtctcctgcaaggcttctggattcaacatcaaggactactatatgcactgggtgcgacaggctcctggacaaaggcttgagtggatgggatggatcgaccttgaaaatggtaacacaatctatgacccgaagtttcagggcagggtcaccataaccagggacacgtccgccagcacagcctacatggagctgagcagcctgagatctgaagacacggcggtgtactactgcgcgagagatgcttacgggagatatttttacgacgtgtggggccaaggaaccctggtcaccgtctcctca

SEQ ID NO: 4562 - protein, 119 aa, Artificial Sequence
  Description of Artificial Sequence: Synthetic Heavy chain variable region amino acid sequence
QVQLVQSGAEVKKPGASVKVSCKASGFNIKDYYMHWVRQAPGQRLEWMGWIDLENGNTIYDPKFQGRVTITRDTSASTAYMELSSLRSEDTAVYYCARDAYGRYFYDVWGQGTLVTVSS

SEQ ID NO: 4563 - protein, 9 aa, Artificial Sequence
  Description of Artificial Sequence: Synthetic Heavy chain variable region CDR H1 amino acid sequence
FNIKDYYMH

SEQ ID NO: 4564 - DNA, 27 bp, Artificial Sequence
  Description of Artificial Sequence: Synthetic Heavy chain variable region CDR H1 nucleic acid sequence
ttcaacatcaaggactactatatgcac

SEQ ID NO: 4565 - protein, 17 aa, Artificial Sequence
  Description of Artificial Sequence: Synthetic Heavy chain variable region CDR H2 amino acid sequence
WIDLENGNTIYDPKFQG

SEQ ID NO: 4566 - DNA, 51 bp, Artificial Sequence; identical to SEQ ID NO: 3574
  Description of Artificial Sequence: Synthetic Heavy chain variable region CDR H2 nucleic acid sequence

SEQ ID NO: 4567 - protein, 12 aa, Artificial Sequence
  Description of Artificial Sequence: Synthetic Heavy chain variable region CDR H3 amino acid sequence
ARDAYGRYFYDV

SEQ ID NO: 4568 - DNA, 36 bp, Artificial Sequence
  Description of Artificial Sequence: Synthetic Heavy chain variable region CDR H3 nucleic acid sequence
gcgagagatgcttacgggagatatttttacgacgtg

SEQ ID NO: 4569 - DNA, 336 bp, Artificial Sequence; identical to SEQ ID NO: 4537
  Description of Artificial Sequence: Synthetic Light chain variable region nucleic acid sequence

SEQ ID NO: 4570 - protein, 112 aa, Artificial Sequence; identical to SEQ ID NO: 4538
  Description of Artificial Sequence: Synthetic Light chain variable region amino acid sequence

SEQ ID NO: 4571 - protein, 17 aa, Artificial Sequence
  Description of Artificial Sequence: Synthetic Light chain variable region CDR L1 amino acid sequence
KSSQSLLNARTGKNYLA

SEQ ID NO: 4572 - DNA, 51 bp, Artificial Sequence; identical to SEQ ID NO: 4540
  Description of Artificial Sequence: Synthetic Light chain variable region CDR L1 nucleic acid sequence

SEQ ID NO: 4573 - protein, 7 aa, Artificial Sequence
  Description of Artificial Sequence: Synthetic Light chain variable region CDR L2 amino acid sequence
WASTRES

SEQ ID NO: 4574 - DNA, 21 bp, Artificial Sequence
  Description of Artificial Sequence: Synthetic Light chain variable region CDR L2 nucleic acid sequence
tgggcatctacccgggaatcc

SEQ ID NO: 4575 - protein, 8 aa, Artificial Sequence
  Description of Artificial Sequence: Synthetic Light chain variable region CDR L3 amino acid sequence
KQSYSRRT

SEQ ID NO: 4576 - DNA, 24 bp, Artificial Sequence
  Description of Artificial Sequence: Synthetic Light chain variable region CDR L3 nucleic acid sequence
aagcaatcttattctcggagaact

SEQ ID NO: 4577 - DNA, 357 bp, Artificial Sequence
  Description of Artificial Sequence: Synthetic Heavy chain variable region nucleic acid sequence
caggtgcagctggtgcagtctggggctgaggtgaagaagcctggggcctcagtgaaggtctcctgcaaggcttctggattcaacatcaaggactactatatgcactgggtgcgacaggctcctggacaaaggcttgagtggatgggatggatcgaccttgaaaatggtaacacaatctatgacgctaagtttcagggcagggtcaccataaccagggacacgtccgccagcacagcctacatggagctgagcagcctgagatctgaagacacggcggtgtactactgcgcgagagatgcttacgggagatatttttacgacgtgtggggccaaggaaccctggtcaccgtctcctca

SEQ ID NO: 4578 - protein, 119 aa, Artificial Sequence
  Description of Artificial Sequence: Synthetic Heavy chain variable region amino acid sequence
QVQLVQSGAEVKKPGASVKVSCKASGFNIKDYYMHWVRQAPGQRLEWMGWIDLENGNTIYDAKFQGRVTITRDTSASTAYMELSSLRSEDTAVYYCARDAYGRYFYDVWGQGTLVTVSS

SEQ ID NO: 4579 - protein, 9 aa, Artificial Sequence
  Description of Artificial Sequence: Synthetic Heavy chain variable region CDR H1 amino acid sequence
FNIKDYYMH

SEQ ID NO: 4580 - DNA, 27 bp, Artificial Sequence
  Description of Artificial Sequence: Synthetic Heavy chain variable region CDR H1 nucleic acid sequence
ttcaacatcaaggactactatatgcac

SEQ ID NO: 4581 - protein, 17 aa, Artificial Sequence
  Description of Artificial Sequence: Synthetic Heavy chain variable region CDR H2 amino acid sequence
WIDLENGNTIYDAKFQG

SEQ ID NO: 4582 - DNA, 51 bp, Artificial Sequence; identical to SEQ ID NO: 4550
  Description of Artificial Sequence: Synthetic Heavy chain variable region CDR H2 nucleic acid sequence

SEQ ID NO: 4583 - protein, 12 aa, Artificial Sequence
  Description of Artificial Sequence: Synthetic Heavy chain variable region CDR H3 amino acid sequence
ARDAYGRYFYDV

SEQ ID NO: 4584 - DNA, 36 bp, Artificial Sequence; identical to SEQ ID NO: 4568
  Description of Artificial Sequence: Synthetic Heavy chain variable region CDR H3 nucleic acid sequence

SEQ ID NO: 4585 - DNA, 336 bp, Artificial Sequence; identical to SEQ ID NO: 4537
  Description of Artificial Sequence: Synthetic Light chain variable region nucleic acid sequence

SEQ ID NO: 4586 - protein, 112 aa, Artificial Sequence; identical to SEQ ID NO: 4538
  Description of Artificial Sequence: Synthetic Light chain variable region amino acid sequence

SEQ ID NO: 4587 - protein, 17 aa, Artificial Sequence
  Description of Artificial Sequence: Synthetic Light chain variable region CDR L1 amino acid sequence
KSSQSLLNARTGKNYLA

SEQ ID NO: 4588 - DNA, 51 bp, Artificial Sequence; identical to SEQ ID NO: 4540
  Description of Artificial Sequence: Synthetic Light chain variable region CDR L1 nucleic acid sequence

SEQ ID NO: 4589 - protein, 7 aa, Artificial Sequence
  Description of Artificial Sequence: Synthetic Light chain variable region CDR L2 amino acid sequence
WASTRES

SEQ ID NO: 4590 - DNA, 21 bp, Artificial Sequence
  Description of Artificial Sequence: Synthetic Light chain variable region CDR L2 nucleic acid sequence
tgggcatctacccgggaatcc

SEQ ID NO: 4591 - protein, 8 aa, Artificial Sequence
  Description of Artificial Sequence: Synthetic Light chain variable region CDR L3 amino acid sequence
KQSYSRRT

SEQ ID NO: 4592 - DNA, 24 bp, Artificial Sequence
  Description of Artificial Sequence: Synthetic Light chain variable region CDR L3 nucleic acid sequence
aagcaatcttattctcggagaact

SEQ ID NO: 4593 - DNA, 357 bp, Artificial Sequence
  Description of Artificial Sequence: Synthetic Heavy chain variable region nucleic acid sequence
caggtgcagctggtgcagtctggggctgaggtgaagaagcctggggcctcagtgaaggtctcctgcaaggcttctggattcaacatcaaggactactatatgcactgggtgcgacaggctcctggacaaaggcttgagtggatgggatggatcgaccttgaaaatgctaacacaatctatgacccgaagtttcagggcagggtcaccataaccagggacacgtccgccagcacagcctacatggagctgagcagcctgagatctgaagacacggcggtgtactactgcgcgagagatgcttacgggagatatttttacgacgtgtggggccaaggaaccctggtcaccgtctcctca

SEQ ID NO: 4594 - protein, 119 aa, Artificial Sequence
  Description of Artificial Sequence: Synthetic Heavy chain variable region amino acid sequence
QVQLVQSGAEVKKPGASVKVSCKASGFNIKDYYMHWVRQAPGQRLEWMGWIDLENANTIYDPKFQGRVTITRDTSASTAYMELSSLRSEDTAVYYCARDAYGRYFYDVWGQGTLVTVSS

SEQ ID NO: 4595 - protein, 9 aa, Artificial Sequence
  Description of Artificial Sequence: Synthetic Heavy chain variable region CDR H1 amino acid sequence
FNIKDYYMH

SEQ ID NO: 4596 - DNA, 27 bp, Artificial Sequence
  Description of Artificial Sequence: Synthetic Heavy chain variable region CDR H1 nucleic acid sequence
ttcaacatcaaggactactatatgcac

SEQ ID NO: 4597 - protein, 17 aa, Artificial Sequence
  Description of Artificial Sequence: Synthetic Heavy chain variable region CDR H2 amino acid sequence
WIDLENANTIYDPKFQG

SEQ ID NO: 4598 - DNA, 51 bp, Artificial Sequence; identical to SEQ ID NO: 4534
  Description of Artificial Sequence: Synthetic Heavy chain variable region CDR H2 nucleic acid sequence

SEQ ID NO: 4599 - protein, 12 aa, Artificial Sequence
  Description of Artificial Sequence: Synthetic Heavy chain variable region CDR H3 amino acid sequence
ARDAYGRYFYDV

SEQ ID NO: 4600 - DNA, 36 bp, Artificial Sequence; identical to SEQ ID NO: 4568
  Description of Artificial Sequence: Synthetic Heavy chain variable region CDR H3 nucleic acid sequence

SEQ ID NO: 4601 - DNA, 336 bp, Artificial Sequence; identical to SEQ ID NO: 4537
  Description of Artificial Sequence: Synthetic Light chain variable region nucleic acid sequence

SEQ ID NO: 4602 - protein, 112 aa, Artificial Sequence; identical to SEQ ID NO: 4538
  Description of Artificial Sequence: Synthetic Light chain variable region amino acid sequence

SEQ ID NO: 4603 - protein, 17 aa, Artificial Sequence
  Description of Artificial Sequence: Synthetic Light chain variable region CDR L1 amino acid sequence
KSSQSLLNARTGKNYLA

SEQ ID NO: 4604 - DNA, 51 bp, Artificial Sequence; identical to SEQ ID NO: 4540
  Description of Artificial Sequence: Synthetic Light chain variable region CDR L1 nucleic acid sequence

SEQ ID NO: 4605 - protein, 7 aa, Artificial Sequence
  Description of Artificial Sequence: Synthetic Light chain variable region CDR L2 amino acid sequence
WASTRES

SEQ ID NO: 4606 - DNA, 21 bp, Artificial Sequence
  Description of Artificial Sequence: Synthetic Light chain variable region CDR L2 nucleic acid sequence
tgggcatctacccgggaatcc

SEQ ID NO: 4607 - protein, 8 aa, Artificial Sequence
  Description of Artificial Sequence: Synthetic Light chain variable region CDR L3 amino acid sequence
KQSYSRRT

SEQ ID NO: 4608 - DNA, 24 bp, Artificial Sequence
  Description of Artificial Sequence: Synthetic Light chain variable region CDR L3 nucleic acid sequence
aagcaatcttattctcggagaact

SEQ ID NO: 4609 - DNA, 357 bp, Artificial Sequence
  Description of Artificial Sequence: Synthetic Heavy chain variable region nucleic acid sequence
caggtgcagctggtgcagtctggggctgaggtgaagaagcctggggcctcagtgaaggtctcctgcaaggcctctggattcaacatcaaggactactatatgcactgggtgcgacaggctcctggacaaaggcttgagtggatgggatggatcgaccttgaaaatgctaacacaatctatgacccgaagtttcagggcagggtcaccataaccagggacacgtccgccagcacagcctacatggagctgagcagcctgagatctgaagacacggcggtgtactactgcgcgagagatggatacgggagatatttttacgacgtgtggggccaaggaaccctggtcaccgtctcctca

SEQ ID NO: 4610 - protein, 119 aa, Artificial Sequence; identical to SEQ ID NO: 4530
  Description of Artificial Sequence: Synthetic Heavy chain variable region amino acid sequence

SEQ ID NO: 4611 - protein, 9 aa, Artificial Sequence
  Description of Artificial Sequence: Synthetic Heavy chain variable region CDR H1 amino acid sequence
FNIKDYYMH

SEQ ID NO: 4612 - DNA, 27 bp, Artificial Sequence
  Description of Artificial Sequence: Synthetic Heavy chain variable region CDR H1 nucleic acid sequence
ttcaacatcaaggactactatatgcac

SEQ ID NO: 4613 - protein, 17 aa, Artificial Sequence
  Description of Artificial Sequence: Synthetic Heavy chain variable region CDR H2 amino acid sequence
WIDLENANTIYDPKFQG

SEQ ID NO: 4614 - DNA, 51 bp, Artificial Sequence; identical to SEQ ID NO: 4534
  Description of Artificial Sequence: Synthetic Heavy chain variable region CDR H2 nucleic acid sequence

SEQ ID NO: 4615 - protein, 12 aa, Artificial Sequence
  Description of Artificial Sequence: Synthetic Heavy chain variable region CDR H3 amino acid sequence
ARDGYGRYFYDV

SEQ ID NO: 4616 - DNA, 36 bp, Artificial Sequence; identical to SEQ ID NO: 4168
  Description of Artificial Sequence: Synthetic Heavy chain variable region CDR H3 nucleic acid sequence

SEQ ID NO: 4617 - DNA, 336 bp, Artificial Sequence; identical to SEQ ID NO: 3865
  Description of Artificial Sequence: Synthetic Light chain variable region nucleic acid sequence

SEQ ID NO: 4618 - protein, 112 aa, Artificial Sequence; identical to SEQ ID NO: 3866
  Description of Artificial Sequence: Synthetic Light chain variable region amino acid sequence

SEQ ID NO: 4619 - protein, 17 aa, Artificial Sequence
  Description of Artificial Sequence: Synthetic Light chain variable region CDR L1 amino acid sequence
KSSQSLLNSRTGKNYLA

SEQ ID NO: 4620 - DNA, 51 bp, Artificial Sequence; identical to SEQ ID NO: 3868
  Description of Artificial Sequence: Synthetic Light chain variable region CDR L1 nucleic acid sequence

SEQ ID NO: 4621 - protein, 7 aa, Artificial Sequence
  Description of Artificial Sequence: Synthetic Light chain variable region CDR L2 amino acid sequence
WASTRES

SEQ ID NO: 4622 - DNA, 21 bp, Artificial Sequence
  Description of Artificial Sequence: Synthetic Light chain variable region CDR L2 nucleic acid sequence
tgggcatctacccgggaatcc

SEQ ID NO: 4623 - protein, 8 aa, Artificial Sequence
  Description of Artificial Sequence: Synthetic Light chain variable region CDR L3 amino acid sequence
KQSYSRRT

SEQ ID NO: 4624 - DNA, 24 bp, Artificial Sequence
  Description of Artificial Sequence: Synthetic Light chain variable region CDR L3 nucleic acid sequence
aagcaatcttattctcggagaact

SEQ ID NO: 4625 - DNA, 357 bp, Artificial Sequence; identical to SEQ ID NO: 4545
  Description of Artificial Sequence: Synthetic Heavy chain variable region nucleic acid sequence

SEQ ID NO: 4626 - protein, 119 aa, Artificial Sequence; identical to SEQ ID NO: 4546
  Description of Artificial Sequence: Synthetic Heavy chain variable region amino acid sequence

SEQ ID NO: 4627 - protein, 9 aa, Artificial Sequence
  Description of Artificial Sequence: Synthetic Heavy chain variable region CDR H1 amino acid sequence
FNIKDYYMH

SEQ ID NO: 4628 - DNA, 27 bp, Artificial Sequence
  Description of Artificial Sequence: Synthetic Heavy chain variable region CDR H1 nucleic acid sequence
ttcaacatcaaggactactatatgcac

SEQ ID NO: 4629 - protein, 17 aa, Artificial Sequence
  Description of Artificial Sequence: Synthetic Heavy chain variable region CDR H2 amino acid sequence
WIDLENGNTIYDAKFQG

SEQ ID NO: 4630 - DNA, 51 bp, Artificial Sequence; identical to SEQ ID NO: 4550
  Description of Artificial Sequence: Synthetic Heavy chain variable region CDR H2 nucleic acid sequence

SEQ ID NO: 4631 - protein, 12 aa, Artificial Sequence
  Description of Artificial Sequence: Synthetic Heavy chain variable region CDR H3 amino acid sequence
ARDGYGRYFYDV

SEQ ID NO: 4632 - DNA, 36 bp, Artificial Sequence; identical to SEQ ID NO: 4168
  Description of Artificial Sequence: Synthetic Heavy chain variable region CDR H3 nucleic acid sequence

SEQ ID NO: 4633 - DNA, 336 bp, Artificial Sequence; identical to SEQ ID NO: 3865
  Description of Artificial Sequence: Synthetic Light chain variable region nucleic acid sequence

SEQ ID NO: 4634 - protein, 112 aa, Artificial Sequence; identical to SEQ ID NO: 3866
  Description of Artificial Sequence: Synthetic Light chain variable region amino acid sequence

SEQ ID NO: 4635 - protein, 17 aa, Artificial Sequence
  Description of Artificial Sequence: Synthetic Light chain variable region CDR L1 amino acid sequence
KSSQSLLNSRTGKNYLA

SEQ ID NO: 4636 - DNA, 51 bp, Artificial Sequence; identical to SEQ ID NO: 3868
  Description of Artificial Sequence: Synthetic Light chain variable region CDR L1 nucleic acid sequence

SEQ ID NO: 4637 - protein, 7 aa, Artificial Sequence
  Description of Artificial Sequence: Synthetic Light chain variable region CDR L2 amino acid sequence
WASTRES

SEQ ID NO: 4638 - DNA, 21 bp, Artificial Sequence
  Description of Artificial Sequence: Synthetic Light chain variable region CDR L2 nucleic acid sequence
tgggcatctacccgggaatcc

SEQ ID NO: 4639 - protein, 8 aa, Artificial Sequence
  Description of Artificial Sequence: Synthetic Light chain variable region CDR L3 amino acid sequence
KQSYSRRT

SEQ ID NO: 4640 - DNA, 24 bp, Artificial Sequence
  Description of Artificial Sequence: Synthetic Light chain variable region CDR L3 nucleic acid sequence
aagcaatcttattctcggagaact

SEQ ID NO: 4641 - DNA, 357 bp, Artificial Sequence; identical to SEQ ID NO: 4561
  Description of Artificial Sequence: Synthetic Heavy chain variable region nucleic acid sequence

SEQ ID NO: 4642 - protein, 119 aa, Artificial Sequence; identical to SEQ ID NO: 4562
  Description of Artificial Sequence: Synthetic Heavy chain variable region amino acid sequence

SEQ ID NO: 4643 - protein, 9 aa, Artificial Sequence
  Description of Artificial Sequence: Synthetic Heavy chain variable region CDR H1 amino acid sequence
FNIKDYYMH

SEQ ID NO: 4644 - DNA, 27 bp, Artificial Sequence
  Description of Artificial Sequence: Synthetic Heavy chain variable region CDR H1 nucleic acid sequence
ttcaacatcaaggactactatatgcac

SEQ ID NO: 4645 - protein, 17 aa, Artificial Sequence
  Description of Artificial Sequence: Synthetic Heavy chain variable region CDR H2 amino acid sequence
WIDLENGNTIYDPKFQG

SEQ ID NO: 4646 - DNA, 51 bp, Artificial Sequence; identical to SEQ ID NO: 3574
  Description of Artificial Sequence: Synthetic Heavy chain variable region CDR H2 nucleic acid sequence

SEQ ID NO: 4647 - protein, 12 aa, Artificial Sequence
  Description of Artificial Sequence: Synthetic Heavy chain variable region CDR H3 amino acid sequence
ARDAYGRYFYDV

SEQ ID NO: 4648 - DNA, 36 bp, Artificial Sequence; identical to SEQ ID NO: 4568
  Description of Artificial Sequence: Synthetic Heavy chain variable region CDR H3 nucleic acid sequence

SEQ ID NO: 4649 - DNA, 336 bp, Artificial Sequence; identical to SEQ ID NO: 3865
  Description of Artificial Sequence: Synthetic Light chain variable region nucleic acid sequence

SEQ ID NO: 4650 - protein, 112 aa, Artificial Sequence; identical to SEQ ID NO: 3866
  Description of Artificial Sequence: Synthetic Light chain variable region amino acid sequence

SEQ ID NO: 4651 - protein, 17 aa, Artificial Sequence
  Description of Artificial Sequence: Synthetic Light chain variable region CDR L1 amino acid sequence
KSSQSLLNSRTGKNYLA

SEQ ID NO: 4652 - DNA, 51 bp, Artificial Sequence; identical to SEQ ID NO: 3868
  Description of Artificial Sequence: Synthetic Light chain variable region CDR L1 nucleic acid sequence

SEQ ID NO: 4653 - protein, 7 aa, Artificial Sequence
  Description of Artificial Sequence: Synthetic Light chain variable region CDR L2 amino acid sequence
WASTRES

SEQ ID NO: 4654 - DNA, 21 bp, Artificial Sequence
  Description of Artificial Sequence: Synthetic Light chain variable region CDR L2 nucleic acid sequence
tgggcatctacccgggaatcc

SEQ ID NO: 4655 - protein, 8 aa, Artificial Sequence
  Description of Artificial Sequence: Synthetic Light chain variable region CDR L3 amino acid sequence
KQSYSRRT

SEQ ID NO: 4656 - DNA, 24 bp, Artificial Sequence
  Description of Artificial Sequence: Synthetic Light chain variable region CDR L3 nucleic acid sequence
aagcaatcttattctcggagaact

SEQ ID NO: 4657 - DNA, 357 bp, Artificial Sequence
  Description of Artificial Sequence: Synthetic Heavy chain variable region nucleic acid sequence
caggtgcagctggtgcagtctggggctgaggtgaagaagcctggggcctcagtgaaggtctcctgcaaggcttctggattcaacatcaaggactactatatgcactgggtgcgacaggctcctggacaaaggcttgagtggatgggatggatcgaccttgaaaatgctaacacaatctatgacgctaagtttcagggcagggtcaccataaccagggacacgtccgccagcacagcctacatggagctgagcagcctgagatctgaagacacggcggtgtactactgcgcgagagatggatacgggagatatttttacgacgtgtggggccaaggaaccctggtcaccgtctcctca

SEQ ID NO: 4658 - protein, 119 aa, Artificial Sequence
  Description of Artificial Sequence: Synthetic Heavy chain variable region amino acid sequence
QVQLVQSGAEVKKPGASVKVSCKASGFNIKDYYMHWVRQAPGQRLEWMGWIDLENANTIYDAKFQGRVTITRDTSASTAYMELSSLRSEDTAVYYCARDGYGRYFYDVWGQGTLVTVSS

SEQ ID NO: 4659 - protein, 9 aa, Artificial Sequence
  Description of Artificial Sequence: Synthetic Heavy chain variable region CDR H1 amino acid sequence
FNIKDYYMH

SEQ ID NO: 4660 - DNA, 27 bp, Artificial Sequence
  Description of Artificial Sequence: Synthetic Heavy chain variable region CDR H1 nucleic acid sequence
ttcaacatcaaggactactatatgcac

SEQ ID NO: 4661 - protein, 17 aa, Artificial Sequence
  Description of Artificial Sequence: Synthetic Heavy chain variable region CDR H2 amino acid sequence
WIDLENANTIYDAKFQG

SEQ ID NO: 4662 - DNA, 51 bp, Artificial Sequence
  Description of Artificial Sequence: Synthetic Heavy chain variable region CDR H2 nucleic acid sequence
tggatcgaccttgaaaatgctaacacaatctatgacgctaagtttcagggc

SEQ ID NO: 4663 - protein, 12 aa, Artificial Sequence
  Description of Artificial Sequence: Synthetic Heavy chain variable region CDR H3 amino acid sequence
ARDGYGRYFYDV

SEQ ID NO: 4664 - DNA, 36 bp, Artificial Sequence; identical to SEQ ID NO: 4168
  Description of Artificial Sequence: Synthetic Heavy chain variable region CDR H3 nucleic acid sequence

SEQ ID NO: 4665 - DNA, 336 bp, Artificial Sequence; identical to SEQ ID NO: 3865
  Description of Artificial Sequence: Synthetic Light chain variable region nucleic acid sequence

SEQ ID NO: 4666 - protein, 112 aa, Artificial Sequence; identical to SEQ ID NO: 3866
  Description of Artificial Sequence: Synthetic Light chain variable region amino acid sequence

SEQ ID NO: 4667 - protein, 17 aa, Artificial Sequence
  Description of Artificial Sequence: Synthetic Light chain variable region CDR L1 amino acid sequence
KSSQSLLNSRTGKNYLA

SEQ ID NO: 4668 - DNA, 51 bp, Artificial Sequence; identical to SEQ ID NO: 3868
  Description of Artificial Sequence: Synthetic Light chain variable region CDR L1 nucleic acid sequence

SEQ ID NO: 4669 - protein, 7 aa, Artificial Sequence
  Description of Artificial Sequence: Synthetic Light chain variable region CDR L2 amino acid sequence
WASTRES

SEQ ID NO: 4670 - DNA, 21 bp, Artificial Sequence
  Description of Artificial Sequence: Synthetic Light chain variable region CDR L2 nucleic acid sequence
tgggcatctacccgggaatcc

SEQ ID NO: 4671 - protein, 8 aa, Artificial Sequence
  Description of Artificial Sequence: Synthetic Light chain variable region CDR L3 amino acid sequence
KQSYSRRT

SEQ ID NO: 4672 - DNA, 24 bp, Artificial Sequence
  Description of Artificial Sequence: Synthetic Light chain variable region CDR L3 nucleic acid sequence
aagcaatcttattctcggagaact

SEQ ID NO: 4673 - DNA, 357 bp, Artificial Sequence; identical to SEQ ID NO: 4577
  Description of Artificial Sequence: Synthetic Heavy chain variable region nucleic acid sequence

SEQ ID NO: 4674 - protein, 119 aa, Artificial Sequence; identical to SEQ ID NO: 4578
  Description of Artificial Sequence: Synthetic Heavy chain variable region amino acid sequence

SEQ ID NO: 4675 - protein, 9 aa, Artificial Sequence
  Description of Artificial Sequence: Synthetic Heavy chain variable region CDR H1 amino acid sequence
FNIKDYYMH

SEQ ID NO: 4676 - DNA, 27 bp, Artificial Sequence
  Description of Artificial Sequence: Synthetic Heavy chain variable region CDR H1 nucleic acid sequence
ttcaacatcaaggactactatatgcac

SEQ ID NO: 4677 - protein, 17 aa, Artificial Sequence
  Description of Artificial Sequence: Synthetic Heavy chain variable region CDR H2 amino acid sequence
WIDLENGNTIYDAKFQG

SEQ ID NO: 4678 - DNA, 51 bp, Artificial Sequence; identical to SEQ ID NO: 4550
  Description of Artificial Sequence: Synthetic Heavy chain variable region CDR H2 nucleic acid sequence

SEQ ID NO: 4679 - protein, 12 aa, Artificial Sequence
  Description of Artificial Sequence: Synthetic Heavy chain variable region CDR H3 amino acid sequence
ARDAYGRYFYDV

SEQ ID NO: 4680 - DNA, 36 bp, Artificial Sequence; identical to SEQ ID NO: 4568
  Description of Artificial Sequence: Synthetic Heavy chain variable region CDR H3 nucleic acid sequence

SEQ ID NO: 4681 - DNA, 336 bp, Artificial Sequence; identical to SEQ ID NO: 3865
  Description of Artificial Sequence: Synthetic Light chain variable region nucleic acid sequence

SEQ ID NO: 4682 - protein, 112 aa, Artificial Sequence; identical to SEQ ID NO: 3866
  Description of Artificial Sequence: Synthetic Light chain variable region amino acid sequence

SEQ ID NO: 4683 - protein, 17 aa, Artificial Sequence
  Description of Artificial Sequence: Synthetic Light chain variable region CDR L1 amino acid sequence
KSSQSLLNSRTGKNYLA

SEQ ID NO: 4684 - DNA, 51 bp, Artificial Sequence; identical to SEQ ID NO: 3868
  Description of Artificial Sequence: Synthetic Light chain variable region CDR L1 nucleic acid sequence

SEQ ID NO: 4685 - protein, 7 aa, Artificial Sequence
  Description of Artificial Sequence: Synthetic Light chain variable region CDR L2 amino acid sequence
WASTRES

SEQ ID NO: 4686 - DNA, 21 bp, Artificial Sequence
  Description of Artificial Sequence: Synthetic Light chain variable region CDR L2 nucleic acid sequence
tgggcatctacccgggaatcc

SEQ ID NO: 4687 - protein, 8 aa, Artificial Sequence
  Description of Artificial Sequence: Synthetic Light chain variable region CDR L3 amino acid sequence
KQSYSRRT

SEQ ID NO: 4688 - DNA, 24 bp, Artificial Sequence
  Description of Artificial Sequence: Synthetic Light chain variable region CDR L3 nucleic acid sequence
aagcaatcttattctcggagaact

SEQ ID NO: 4689 - DNA, 357 bp, Artificial Sequence; identical to SEQ ID NO: 4593
  Description of Artificial Sequence: Synthetic Heavy chain variable region nucleic acid sequence

SEQ ID NO: 4690 - protein, 119 aa, Artificial Sequence; identical to SEQ ID NO: 4594
  Description of Artificial Sequence: Synthetic Heavy chain variable region amino acid sequence

SEQ ID NO: 4691 - protein, 9 aa, Artificial Sequence
  Description of Artificial Sequence: Synthetic Heavy chain variable region CDR H1 amino acid sequence
FNIKDYYMH

SEQ ID NO: 4692 - DNA, 27 bp, Artificial Sequence
  Description of Artificial Sequence: Synthetic Heavy chain variable region CDR H1 nucleic acid sequence
ttcaacatcaaggactactatatgcac

SEQ ID NO: 4693 - protein, 17 aa, Artificial Sequence
  Description of Artificial Sequence: Synthetic Heavy chain variable region CDR H2 amino acid sequence
WIDLENANTIYDPKFQG

SEQ ID NO: 4694 - DNA, 51 bp, Artificial Sequence; identical to SEQ ID NO: 4534
  Description of Artificial Sequence: Synthetic Heavy chain variable region CDR H2 nucleic acid sequence

SEQ ID NO: 4695 - protein, 12 aa, Artificial Sequence
  Description of Artificial Sequence: Synthetic Heavy chain variable region CDR H3 amino acid sequence
ARDAYGRYFYDV

SEQ ID NO: 4696 - DNA, 36 bp, Artificial Sequence; identical to SEQ ID NO: 4568
  Description of Artificial Sequence: Synthetic Heavy chain variable region CDR H3 nucleic acid sequence

SEQ ID NO: 4697 - DNA, 336 bp, Artificial Sequence; identical to SEQ ID NO: 3865
  Description of Artificial Sequence: Synthetic Light chain variable region nucleic acid sequence

SEQ ID NO: 4698 - protein, 112 aa, Artificial Sequence; identical to SEQ ID NO: 3866
  Description of Artificial Sequence: Synthetic Light chain variable region amino acid sequence

SEQ ID NO: 4699 - protein, 17 aa, Artificial Sequence
  Description of Artificial Sequence: Synthetic Light chain variable region CDR L1 amino acid sequence
KSSQSLLNSRTGKNYLA

SEQ ID NO: 4700 - DNA, 51 bp, Artificial Sequence; identical to SEQ ID NO: 3868
  Description of Artificial Sequence: Synthetic Light chain variable region CDR L1 nucleic acid sequence

SEQ ID NO: 4701 - protein, 7 aa, Artificial Sequence
  Description of Artificial Sequence: Synthetic Light chain variable region CDR L2 amino acid sequence
WASTRES

SEQ ID NO: 4702 - DNA, 21 bp, Artificial Sequence
  Description of Artificial Sequence: Synthetic Light chain variable region CDR L2 nucleic acid sequence
tgggcatctacccgggaatcc

SEQ ID NO: 4703 - protein, 8 aa, Artificial Sequence
  Description of Artificial Sequence: Synthetic Light chain variable region CDR L3 amino acid sequence
KQSYSRRT

SEQ ID NO: 4704 - DNA, 24 bp, Artificial Sequence
  Description of Artificial Sequence: Synthetic Light chain variable region CDR L3 nucleic acid sequence
aagcaatcttattctcggagaact

SEQ ID NO: 4705 - DNA, 357 bp, Artificial Sequence
  Description of Artificial Sequence: Synthetic Heavy chain variable region nucleic acid sequence
caggtgcagctggtgcagtctggggctgaggtgaagaagcctggggcctcagtgaaggtctcctgcaaggcttctggattcaacatcaaggactactatatgcactgggtgcgacaggctcctggacaaaggcttgagtggatgggatggatcgaccttgaaaatgctaacacaatctatgacgctaagtttcagggcagggtcaccataaccagggacacgtccgccagcacagcctacatggagctgagcagcctgagatctgaagacacggcggtgtactactgcgcgagagatgcttacgggagatatttttacgacgtgtggggccaaggaaccctggtcaccgtctcctca

SEQ ID NO: 4706 - protein, 119 aa, Artificial Sequence
  Description of Artificial Sequence: Synthetic Heavy chain variable region amino acid sequence
QVQLVQSGAEVKKPGASVKVSCKASGFNIKDYYMHWVRQAPGQRLEWMGWIDLENANTIYDAKFQGRVTITRDTSASTAYMELSSLRSEDTAVYYCARDAYGRYFYDVWGQGTLVTVSS

SEQ ID NO: 4707 - protein, 9 aa, Artificial Sequence
  Description of Artificial Sequence: Synthetic Heavy chain variable region CDR H1 amino acid sequence
FNIKDYYMH

SEQ ID NO: 4708 - DNA, 27 bp, Artificial Sequence
  Description of Artificial Sequence: Synthetic Heavy chain variable region CDR H1 nucleic acid sequence
ttcaacatcaaggactactatatgcac

SEQ ID NO: 4709 - protein, 17 aa, Artificial Sequence
  Description of Artificial Sequence: Synthetic Heavy chain variable region CDR H2 amino acid sequence
WIDLENANTIYDAKFQG

SEQ ID NO: 4710 - DNA, 51 bp, Artificial Sequence; identical to SEQ ID NO: 4662
  Description of Artificial Sequence: Synthetic Heavy chain variable region CDR H2 nucleic acid sequence

SEQ ID NO: 4711 - protein, 12 aa, Artificial Sequence
  Description of Artificial Sequence: Synthetic Heavy chain variable region CDR H3 amino acid sequence
ARDAYGRYFYDV

SEQ ID NO: 4712 - DNA, 36 bp, Artificial Sequence; identical to SEQ ID NO: 4568
  Description of Artificial Sequence: Synthetic Heavy chain variable region CDR H3 nucleic acid sequence

SEQ ID NO: 4713 - DNA, 336 bp, Artificial Sequence; identical to SEQ ID NO: 3865
  Description of Artificial Sequence: Synthetic Light chain variable region nucleic acid sequence

SEQ ID NO: 4714 - protein, 112 aa, Artificial Sequence; identical to SEQ ID NO: 3866
  Description of Artificial Sequence: Synthetic Light chain variable region amino acid sequence

SEQ ID NO: 4715 - protein, 17 aa, Artificial Sequence
  Description of Artificial Sequence: Synthetic Light chain variable region CDR L1 amino acid sequence
KSSQSLLNSRTGKNYLA

SEQ ID NO: 4716 - DNA, 51 bp, Artificial Sequence; identical to SEQ ID NO: 3868
  Description of Artificial Sequence: Synthetic Light chain variable region CDR L1 nucleic acid sequence

SEQ ID NO: 4717 - protein, 7 aa, Artificial Sequence
  Description of Artificial Sequence: Synthetic Light chain variable region CDR L2 amino acid sequence
WASTRES

SEQ ID NO: 4718 - DNA, 21 bp, Artificial Sequence
  Description of Artificial Sequence: Synthetic Light chain variable region CDR L2 nucleic acid sequence
tgggcatctacccgggaatcc

SEQ ID NO: 4719 - protein, 8 aa, Artificial Sequence
  Description of Artificial Sequence: Synthetic Light chain variable region CDR L3 amino acid sequence
KQSYSRRT

SEQ ID NO: 4720 - DNA, 24 bp, Artificial Sequence
  Description of Artificial Sequence: Synthetic Light chain variable region CDR L3 nucleic acid sequence
aagcaatcttattctcggagaact

SEQ ID NO: 4721 - DNA, 357 bp, Artificial Sequence; identical to SEQ ID NO: 4161
  Description of Artificial Sequence: Synthetic Heavy chain variable region nucleic acid sequence

SEQ ID NO: 4722 - protein, 119 aa, Artificial Sequence; identical to SEQ ID NO: 4162
  Description of Artificial Sequence: Synthetic Heavy chain variable region amino acid sequence

SEQ ID NO: 4723 - protein, 9 aa, Artificial Sequence
  Description of Artificial Sequence: Synthetic Heavy chain variable region CDR H1 amino acid sequence
FNIKDYYMH

SEQ ID NO: 4724 - DNA, 27 bp, Artificial Sequence
  Description of Artificial Sequence: Synthetic Heavy chain variable region CDR H1 nucleic acid sequence
ttcaacatcaaggactactatatgcac

SEQ ID NO: 4725 - protein, 17 aa, Artificial Sequence
  Description of Artificial Sequence: Synthetic Heavy chain variable region CDR H2 amino acid sequence
WIDLENGNTIYDPKFQG

SEQ ID NO: 4726 - DNA, 51 bp, Artificial Sequence; identical to SEQ ID NO: 3574
  Description of Artificial Sequence: Synthetic Heavy chain variable region CDR H2 nucleic acid sequence

SEQ ID NO: 4727 - protein, 12 aa, Artificial Sequence
  Description of Artificial Sequence: Synthetic Heavy chain variable region CDR H3 amino acid sequence
ARDGYGRYFYDV

SEQ ID NO: 4728 - DNA, 36 bp, Artificial Sequence; identical to SEQ ID NO: 4168
  Description of Artificial Sequence: Synthetic Heavy chain variable region CDR H3 nucleic acid sequence

SEQ ID NO: 4729 - DNA, 336 bp, Artificial Sequence; identical to SEQ ID NO: 3865
  Description of Artificial Sequence: Synthetic Light chain variable region nucleic acid sequence

SEQ ID NO: 4730 - protein, 112 aa, Artificial Sequence; identical to SEQ ID NO: 3866
  Description of Artificial Sequence: Synthetic Light chain variable region amino acid sequence

SEQ ID NO: 4731 - protein, 17 aa, Artificial Sequence
  Description of Artificial Sequence: Synthetic Light chain variable region CDR L1 amino acid sequence
KSSQSLLNSRTGKNYLA

SEQ ID NO: 4732 - DNA, 51 bp, Artificial Sequence; identical to SEQ ID NO: 3868
  Description of Artificial Sequence: Synthetic Light chain variable region CDR L1 nucleic acid sequence

SEQ ID NO: 4733 - protein, 7 aa, Artificial Sequence
  Description of Artificial Sequence: Synthetic Light chain variable region CDR L2 amino acid sequence
WASTRES

SEQ ID NO: 4734 - DNA, 21 bp, Artificial Sequence
  Description of Artificial Sequence: Synthetic Light chain variable region CDR L2 nucleic acid sequence
tgggcatctacccgggaatcc

SEQ ID NO: 4735 - protein, 8 aa, Artificial Sequence
  Description of Artificial Sequence: Synthetic Light chain variable region CDR L3 amino acid sequence
KQSYSRRT

SEQ ID NO: 4736 - DNA, 24 bp, Artificial Sequence
  Description of Artificial Sequence: Synthetic Light chain variable region CDR L3 nucleic acid sequence
aagcaatcttattctcggagaact

SEQ ID NO: 4737 - DNA, 357 bp, Artificial Sequence; identical to SEQ ID NO: 4161
  Description of Artificial Sequence: Synthetic Heavy chain variable region nucleic acid sequence

SEQ ID NO: 4738 - protein, 119 aa, Artificial Sequence; identical to SEQ ID NO: 4162
  Description of Artificial Sequence: Synthetic Heavy chain variable region amino acid sequence

SEQ ID NO: 4739 - protein, 9 aa, Artificial Sequence
  Description of Artificial Sequence: Synthetic Heavy chain variable region CDR H1 amino acid sequence
FNIKDYYMH

SEQ ID NO: 4740 - DNA, 27 bp, Artificial Sequence
  Description of Artificial Sequence: Synthetic Heavy chain variable region CDR H1 nucleic acid sequence
ttcaacatcaaggactactatatgcac

SEQ ID NO: 4741 - protein, 17 aa, Artificial Sequence
  Description of Artificial Sequence: Synthetic Heavy chain variable region CDR H2 amino acid sequence
WIDLENGNTIYDPKFQG

SEQ ID NO: 4742 - DNA, 51 bp, Artificial Sequence; identical to SEQ ID NO: 3574
  Description of Artificial Sequence: Synthetic Heavy chain variable region CDR H2 nucleic acid sequence

SEQ ID NO: 4743 - protein, 12 aa, Artificial Sequence
  Description of Artificial Sequence: Synthetic Heavy chain variable region CDR H3 amino acid sequence
ARDGYGRYFYDV

SEQ ID NO: 4744 - DNA, 36 bp, Artificial Sequence; identical to SEQ ID NO: 4168
  Description of Artificial Sequence: Synthetic Heavy chain variable region CDR H3 nucleic acid sequence

SEQ ID NO: 4745 - DNA, 336 bp, Artificial Sequence; identical to SEQ ID NO: 3865
  Description of Artificial Sequence: Synthetic Light chain variable region nucleic acid sequence

SEQ ID NO: 4746 - protein, 112 aa, Artificial Sequence; identical to SEQ ID NO: 3866
  Description of Artificial Sequence: Synthetic Light chain variable region amino acid sequence

SEQ ID NO: 4747 - protein, 17 aa, Artificial Sequence
  Description of Artificial Sequence: Synthetic Light chain variable region CDR L1 amino acid sequence
KSSQSLLNSRTGKNYLA

SEQ ID NO: 4748 - DNA, 51 bp, Artificial Sequence; identical to SEQ ID NO: 3868
  Description of Artificial Sequence: Synthetic Light chain variable region CDR L1 nucleic acid sequence

SEQ ID NO: 4749 - protein, 7 aa, Artificial Sequence
  Description of Artificial Sequence: Synthetic Light chain variable region CDR L2 amino acid sequence
WASTRES

SEQ ID NO: 4750 - DNA, 21 bp, Artificial Sequence
  Description of Artificial Sequence: Synthetic Light chain variable region CDR L2 nucleic acid sequence
tgggcatctacccgggaatcc

SEQ ID NO: 4751 - protein, 8 aa, Artificial Sequence
  Description of Artificial Sequence: Synthetic Light chain variable region CDR L3 amino acid sequence
KQSYSRRT

SEQ ID NO: 4752 - DNA, 24 bp, Artificial Sequence
  Description of Artificial Sequence: Synthetic Light chain variable region CDR L3 nucleic acid sequence
aagcaatcttattctcggagaact

SEQ ID NO: 4753 - DNA, 357 bp, Artificial Sequence; identical to SEQ ID NO: 4161
  Description of Artificial Sequence: Synthetic Heavy chain variable region nucleic acid sequence

SEQ ID NO: 4754 - protein, 119 aa, Artificial Sequence; identical to SEQ ID NO: 4162
  Description of Artificial Sequence: Synthetic Heavy chain variable region amino acid sequence

SEQ ID NO: 4755 - protein, 9 aa, Artificial Sequence
  Description of Artificial Sequence: Synthetic Heavy chain variable region CDR H1 amino acid sequence
FNIKDYYMH

SEQ ID NO: 4756 - DNA, 27 bp, Artificial Sequence
  Description of Artificial Sequence: Synthetic Heavy chain variable region CDR H1 nucleic acid sequence
ttcaacatcaaggactactatatgcac

SEQ ID NO: 4757 - protein, 17 aa, Artificial Sequence
  Description of Artificial Sequence: Synthetic Heavy chain variable region CDR H2 amino acid sequence
WIDLENGNTIYDPKFQG

SEQ ID NO: 4758 - DNA, 51 bp, Artificial Sequence; identical to SEQ ID NO: 3574
  Description of Artificial Sequence: Synthetic Heavy chain variable region CDR H2 nucleic acid sequence

SEQ ID NO: 4759 - protein, 12 aa, Artificial Sequence
  Description of Artificial Sequence: Synthetic Heavy chain variable region CDR H3 amino acid sequence
ARDGYGRYFYDV

SEQ ID NO: 4760 - DNA, 36 bp, Artificial Sequence; identical to SEQ ID NO: 4168
  Description of Artificial Sequence: Synthetic Heavy chain variable region CDR H3 nucleic acid sequence

SEQ ID NO: 4761 - DNA, 336 bp, Artificial Sequence; identical to SEQ ID NO: 3865
  Description of Artificial Sequence: Synthetic Light chain variable region nucleic acid sequence

SEQ ID NO: 4762 - protein, 112 aa, Artificial Sequence; identical to SEQ ID NO: 3866
  Description of Artificial Sequence: Synthetic Light chain variable region amino acid sequence

SEQ ID NO: 4763 - protein, 17 aa, Artificial Sequence
  Description of Artificial Sequence: Synthetic Light chain variable region CDR L1 amino acid sequence
KSSQSLLNSRTGKNYLA

SEQ ID NO: 4764 - DNA, 51 bp, Artificial Sequence; identical to SEQ ID NO: 3868
  Description of Artificial Sequence: Synthetic Light chain variable region CDR L1 nucleic acid sequence

SEQ ID NO: 4765 - protein, 7 aa, Artificial Sequence
  Description of Artificial Sequence: Synthetic Light chain variable region CDR L2 amino acid sequence
WASTRES

SEQ ID NO: 4766 - DNA, 21 bp, Artificial Sequence
  Description of Artificial Sequence: Synthetic Light chain variable region CDR L2 nucleic acid sequence
tgggcatctacccgggaatcc

SEQ ID NO: 4767 - protein, 8 aa, Artificial Sequence
  Description of Artificial Sequence: Synthetic Light chain variable region CDR L3 amino acid sequence
KQSYSRRT

SEQ ID NO: 4768 - DNA, 24 bp, Artificial Sequence
  Description of Artificial Sequence: Synthetic Light chain variable region CDR L3 nucleic acid sequence
aagcaatcttattctcggagaact

SEQ ID NO: 4769 - DNA, 357 bp, Artificial Sequence; identical to SEQ ID NO: 4161
  Description of Artificial Sequence: Synthetic Heavy chain variable region nucleic acid sequence

SEQ ID NO: 4770 - protein, 119 aa, Artificial Sequence; identical to SEQ ID NO: 4162
  Description of Artificial Sequence: Synthetic Heavy chain variable region amino acid sequence

SEQ ID NO: 4771 - protein, 9 aa, Artificial Sequence
  Description of Artificial Sequence: Synthetic Heavy chain variable region CDR H1 amino acid sequence
FNIKDYYMH

SEQ ID NO: 4772 - DNA, 27 bp, Artificial Sequence
  Description of Artificial Sequence: Synthetic Heavy chain variable region CDR H1 nucleic acid sequence
ttcaacatcaaggactactatatgcac

SEQ ID NO: 4773 - protein, 17 aa, Artificial Sequence
  Description of Artificial Sequence: Synthetic Heavy chain variable region CDR H2 amino acid sequence
WIDLENGNTIYDPKFQG

SEQ ID NO: 4774 - DNA, 51 bp, Artificial Sequence; identical to SEQ ID NO: 3574
  Description of Artificial Sequence: Synthetic Heavy chain variable region CDR H2 nucleic acid sequence

SEQ ID NO: 4775 - protein, 12 aa, Artificial Sequence
  Description of Artificial Sequence: Synthetic Heavy chain variable region CDR H3 amino acid sequence
ARDGYGRYFYDV

SEQ ID NO: 4776 - DNA, 36 bp, Artificial Sequence; identical to SEQ ID NO: 4168
  Description of Artificial Sequence: Synthetic Heavy chain variable region CDR H3 nucleic acid sequence

SEQ ID NO: 4777 - DNA, 336 bp, Artificial Sequence; identical to SEQ ID NO: 3865
  Description of Artificial Sequence: Synthetic Light chain variable region nucleic acid sequence

SEQ ID NO: 4778 - protein, 112 aa, Artificial Sequence; identical to SEQ ID NO: 3866
  Description of Artificial Sequence: Synthetic Light chain variable region amino acid sequence

SEQ ID NO: 4779 - protein, 17 aa, Artificial Sequence
  Description of Artificial Sequence: Synthetic Light chain variable region CDR L1 amino acid sequence
KSSQSLLNSRTGKNYLA

SEQ ID NO: 4780 - DNA, 51 bp, Artificial Sequence; identical to SEQ ID NO: 3868
  Description of Artificial Sequence: Synthetic Light chain variable region CDR L1 nucleic acid sequence

SEQ ID NO: 4781 - protein, 7 aa, Artificial Sequence
  Description of Artificial Sequence: Synthetic Light chain variable region CDR L2 amino acid sequence
WASTRES

SEQ ID NO: 4782 - DNA, 21 bp, Artificial Sequence
  Description of Artificial Sequence: Synthetic Light chain variable region CDR L2 nucleic acid sequence
tgggcatctacccgggaatcc

SEQ ID NO: 4783 - protein, 8 aa, Artificial Sequence
  Description of Artificial Sequence: Synthetic Light chain variable region CDR L3 amino acid sequence
KQSYSRRT

SEQ ID NO: 4784 - DNA, 24 bp, Artificial Sequence
  Description of Artificial Sequence: Synthetic Light chain variable region CDR L3 nucleic acid sequence
aagcaatcttattctcggagaact

SEQ ID NO: 4785 - DNA, 357 bp, Artificial Sequence; identical to SEQ ID NO: 4161
  Description of Artificial Sequence: Synthetic Heavy chain variable region nucleic acid sequence

SEQ ID NO: 4786 - protein, 119 aa, Artificial Sequence; identical to SEQ ID NO: 4162
  Description of Artificial Sequence: Synthetic Heavy chain variable region amino acid sequence

SEQ ID NO: 4787 - protein, 9 aa, Artificial Sequence
  Description of Artificial Sequence: Synthetic Heavy chain variable region CDR H1 amino acid sequence
FNIKDYYMH

SEQ ID NO: 4788 - DNA, 27 bp, Artificial Sequence
  Description of Artificial Sequence: Synthetic Heavy chain variable region CDR H1 nucleic acid sequence
ttcaacatcaaggactactatatgcac

SEQ ID NO: 4789 - protein, 17 aa, Artificial Sequence
  Description of Artificial Sequence: Synthetic Heavy chain variable region CDR H2 amino acid sequence
WIDLENGNTIYDPKFQG

SEQ ID NO: 4790 - DNA, 51 bp, Artificial Sequence; identical to SEQ ID NO: 3574
  Description of Artificial Sequence: Synthetic Heavy chain variable region CDR H2 nucleic acid sequence

SEQ ID NO: 4791 - protein, 12 aa, Artificial Sequence
  Description of Artificial Sequence: Synthetic Heavy chain variable region CDR H3 amino acid sequence
ARDGYGRYFYDV

SEQ ID NO: 4792 - DNA, 36 bp, Artificial Sequence; identical to SEQ ID NO: 4168
  Description of Artificial Sequence: Synthetic Heavy chain variable region CDR H3 nucleic acid sequence

SEQ ID NO: 4793 - DNA, 336 bp, Artificial Sequence; identical to SEQ ID NO: 3865
  Description of Artificial Sequence: Synthetic Light chain variable region nucleic acid sequence

SEQ ID NO: 4794 - protein, 112 aa, Artificial Sequence; identical to SEQ ID NO: 3866
  Description of Artificial Sequence: Synthetic Light chain variable region amino acid sequence

SEQ ID NO: 4795 - protein, 17 aa, Artificial Sequence
  Description of Artificial Sequence: Synthetic Light chain variable region CDR L1 amino acid sequence
KSSQSLLNSRTGKNYLA

SEQ ID NO: 4796 - DNA, 51 bp, Artificial Sequence; identical to SEQ ID NO: 3868
  Description of Artificial Sequence: Synthetic Light chain variable region CDR L1 nucleic acid sequence

SEQ ID NO: 4797 - protein, 7 aa, Artificial Sequence
  Description of Artificial Sequence: Synthetic Light chain variable region CDR L2 amino acid sequence
WASTRES

SEQ ID NO: 4798 - DNA, 21 bp, Artificial Sequence
  Description of Artificial Sequence: Synthetic Light chain variable region CDR L2 nucleic acid sequence
tgggcatctacccgggaatcc

SEQ ID NO: 4799 - protein, 8 aa, Artificial Sequence
  Description of Artificial Sequence: Synthetic Light chain variable region CDR L3 amino acid sequence
KQSYSRRT

SEQ ID NO: 4800 - DNA, 24 bp, Artificial Sequence
  Description of Artificial Sequence: Synthetic Light chain variable region CDR L3 nucleic acid sequence
aagcaatcttattctcggagaact

SEQ ID NO: 4801 - DNA, 357 bp, Artificial Sequence; identical to SEQ ID NO: 4161
  Description of Artificial Sequence: Synthetic Heavy chain variable region nucleic acid sequence

SEQ ID NO: 4802 - protein, 119 aa, Artificial Sequence; identical to SEQ ID NO: 4162
  Description of Artificial Sequence: Synthetic Heavy chain variable region amino acid sequence

SEQ ID NO: 4803 - protein, 9 aa, Artificial Sequence
  Description of Artificial Sequence: Synthetic Heavy chain variable region CDR H1 amino acid sequence
FNIKDYYMH

SEQ ID NO: 4804 - DNA, 27 bp, Artificial Sequence
  Description of Artificial Sequence: Synthetic Heavy chain variable region CDR H1 nucleic acid sequence
ttcaacatcaaggactactatatgcac

SEQ ID NO: 4805 - protein, 17 aa, Artificial Sequence
  Description of Artificial Sequence: Synthetic Heavy chain variable region CDR H2 amino acid sequence
WIDLENGNTIYDPKFQG

SEQ ID NO: 4806 - DNA, 51 bp, Artificial Sequence; identical to SEQ ID NO: 3574
  Description of Artificial Sequence: Synthetic Heavy chain variable region CDR H2 nucleic acid sequence

SEQ ID NO: 4807 - protein, 12 aa, Artificial Sequence
  Description of Artificial Sequence: Synthetic Heavy chain variable region CDR H3 amino acid sequence
ARDGYGRYFYDV

SEQ ID NO: 4808 - DNA, 36 bp, Artificial Sequence; identical to SEQ ID NO: 4168
  Description of Artificial Sequence: Synthetic Heavy chain variable region CDR H3 nucleic acid sequence

SEQ ID NO: 4809 - DNA, 336 bp, Artificial Sequence; identical to SEQ ID NO: 3865
  Description of Artificial Sequence: Synthetic Light chain variable region nucleic acid sequence

SEQ ID NO: 4810 - protein, 112 aa, Artificial Sequence; identical to SEQ ID NO: 3866
  Description of Artificial Sequence: Synthetic Light chain variable region amino acid sequence

SEQ ID NO: 4811 - protein, 17 aa, Artificial Sequence
  Description of Artificial Sequence: Synthetic Light chain variable region CDR L1 amino acid sequence
KSSQSLLNSRTGKNYLA

SEQ ID NO: 4812 - DNA, 51 bp, Artificial Sequence; identical to SEQ ID NO: 3868
  Description of Artificial Sequence: Synthetic Light chain variable region CDR L1 nucleic acid sequence

SEQ ID NO: 4813 - protein, 7 aa, Artificial Sequence
  Description of Artificial Sequence: Synthetic Light chain variable region CDR L2 amino acid sequence
WASTRES

SEQ ID NO: 4814 - DNA, 21 bp, Artificial Sequence
  Description of Artificial Sequence: Synthetic Light chain variable region CDR L2 nucleic acid sequence
tgggcatctacccgggaatcc

SEQ ID NO: 4815 - protein, 8 aa, Artificial Sequence
  Description of Artificial Sequence: Synthetic Light chain variable region CDR L3 amino acid sequence
KQSYSRRT

SEQ ID NO: 4816 - DNA, 24 bp, Artificial Sequence
  Description of Artificial Sequence: Synthetic Light chain variable region CDR L3 nucleic acid sequence
aagcaatcttattctcggagaact

SEQ ID NO: 4817 - DNA, 357 bp, Artificial Sequence; identical to SEQ ID NO: 4161
  Description of Artificial Sequence: Synthetic Heavy chain variable region nucleic acid sequence

SEQ ID NO: 4818 - protein, 119 aa, Artificial Sequence; identical to SEQ ID NO: 4162
  Description of Artificial Sequence: Synthetic Heavy chain variable region amino acid sequence

SEQ ID NO: 4819 - protein, 9 aa, Artificial Sequence
  Description of Artificial Sequence: Synthetic Heavy chain variable region CDR H1 amino acid sequence
FNIKDYYMH

SEQ ID NO: 4820 - DNA, 27 bp, Artificial Sequence
  Description of Artificial Sequence: Synthetic Heavy chain variable region CDR H1 nucleic acid sequence
ttcaacatcaaggactactatatgcac

SEQ ID NO: 4821 - protein, 17 aa, Artificial Sequence
  Description of Artificial Sequence: Synthetic Heavy chain variable region CDR H2 amino acid sequence
WIDLENGNTIYDPKFQG

SEQ ID NO: 4822 - DNA, 51 bp, Artificial Sequence; identical to SEQ ID NO: 3574
  Description of Artificial Sequence: Synthetic Heavy chain variable region CDR H2 nucleic acid sequence

SEQ ID NO: 4823 - protein, 12 aa, Artificial Sequence
  Description of Artificial Sequence: Synthetic Heavy chain variable region CDR H3 amino acid sequence
ARDGYGRYFYDV

SEQ ID NO: 4824 - DNA, 36 bp, Artificial Sequence; identical to SEQ ID NO: 4168
  Description of Artificial Sequence: Synthetic Heavy chain variable region CDR H3 nucleic acid sequence

SEQ ID NO: 4825 - DNA, 336 bp, Artificial Sequence; identical to SEQ ID NO: 3865
  Description of Artificial Sequence: Synthetic Light chain variable region nucleic acid sequence

SEQ ID NO: 4826 - protein, 112 aa, Artificial Sequence; identical to SEQ ID NO: 3866
  Description of Artificial Sequence: Synthetic Light chain variable region amino acid sequence

SEQ ID NO: 4827 - protein, 17 aa, Artificial Sequence
  Description of Artificial Sequence: Synthetic Light chain variable region CDR L1 amino acid sequence
KSSQSLLNSRTGKNYLA

SEQ ID NO: 4828 - DNA, 51 bp, Artificial Sequence; identical to SEQ ID NO: 3868
  Description of Artificial Sequence: Synthetic Light chain variable region CDR L1 nucleic acid sequence

SEQ ID NO: 4829 - protein, 7 aa, Artificial Sequence
  Description of Artificial Sequence: Synthetic Light chain variable region CDR L2 amino acid sequence
WASTRES

SEQ ID NO: 4830 - DNA, 21 bp, Artificial Sequence
  Description of Artificial Sequence: Synthetic Light chain variable region CDR L2 nucleic acid sequence
tgggcatctacccgggaatcc

SEQ ID NO: 4831 - protein, 8 aa, Artificial Sequence
  Description of Artificial Sequence: Synthetic Light chain variable region CDR L3 amino acid sequence
KQSYSRRT

SEQ ID NO: 4832 - DNA, 24 bp, Artificial Sequence
  Description of Artificial Sequence: Synthetic Light chain variable region CDR L3 nucleic acid sequence
aagcaatcttattctcggagaact

SEQ ID NO: 4833 - DNA, 357 bp, Artificial Sequence; identical to SEQ ID NO: 4161
  Description of Artificial Sequence: Synthetic Heavy chain variable region nucleic acid sequence

SEQ ID NO: 4834 - protein, 119 aa, Artificial Sequence; identical to SEQ ID NO: 4162
  Description of Artificial Sequence: Synthetic Heavy chain variable region amino acid sequence

SEQ ID NO: 4835 - protein, 9 aa, Artificial Sequence
  Description of Artificial Sequence: Synthetic Heavy chain variable region CDR H1 amino acid sequence
FNIKDYYMH

SEQ ID NO: 4836 - DNA, 27 bp, Artificial Sequence
  Description of Artificial Sequence: Synthetic Heavy chain variable region CDR H1 nucleic acid sequence
ttcaacatcaaggactactatatgcac

SEQ ID NO: 4837 - protein, 17 aa, Artificial Sequence
  Description of Artificial Sequence: Synthetic Heavy chain variable region CDR H2 amino acid sequence
WIDLENGNTIYDPKFQG

SEQ ID NO: 4838 - DNA, 51 bp, Artificial Sequence; identical to SEQ ID NO: 3574
  Description of Artificial Sequence: Synthetic Heavy chain variable region CDR H2 nucleic acid sequence

SEQ ID NO: 4839 - protein, 12 aa, Artificial Sequence
  Description of Artificial Sequence: Synthetic Heavy chain variable region CDR H3 amino acid sequence
ARDGYGRYFYDV

SEQ ID NO: 4840 - DNA, 36 bp, Artificial Sequence; identical to SEQ ID NO: 4168
  Description of Artificial Sequence: Synthetic Heavy chain variable region CDR H3 nucleic acid sequence

SEQ ID NO: 4841 - DNA, 336 bp, Artificial Sequence; identical to SEQ ID NO: 3865
  Description of Artificial Sequence: Synthetic Light chain variable region nucleic acid sequence

SEQ ID NO: 4842 - protein, 112 aa, Artificial Sequence; identical to SEQ ID NO: 3866
  Description of Artificial Sequence: Synthetic Light chain variable region amino acid sequence

SEQ ID NO: 4843 - protein, 17 aa, Artificial Sequence
  Description of Artificial Sequence: Synthetic Light chain variable region CDR L1 amino acid sequence
KSSQSLLNSRTGKNYLA

SEQ ID NO: 4844 - DNA, 51 bp, Artificial Sequence; identical to SEQ ID NO: 3868
  Description of Artificial Sequence: Synthetic Light chain variable region CDR L1 nucleic acid sequence

SEQ ID NO: 4845 - protein, 7 aa, Artificial Sequence
  Description of Artificial Sequence: Synthetic Light chain variable region CDR L2 amino acid sequence
WASTRES

SEQ ID NO: 4846 - DNA, 21 bp, Artificial Sequence
  Description of Artificial Sequence: Synthetic Light chain variable region CDR L2 nucleic acid sequence
tgggcatctacccgggaatcc

SEQ ID NO: 4847 - protein, 8 aa, Artificial Sequence
  Description of Artificial Sequence: Synthetic Light chain variable region CDR L3 amino acid sequence
KQSYSRRT

SEQ ID NO: 4848 - DNA, 24 bp, Artificial Sequence
  Description of Artificial Sequence: Synthetic Light chain variable region CDR L3 nucleic acid sequence
aagcaatcttattctcggagaact

SEQ ID NO: 4849 - DNA, 357 bp, Artificial Sequence; identical to SEQ ID NO: 4161
  Description of Artificial Sequence: Synthetic Heavy chain variable region nucleic acid sequence

SEQ ID NO: 4850 - protein, 119 aa, Artificial Sequence; identical to SEQ ID NO: 4162
  Description of Artificial Sequence: Synthetic Heavy chain variable region amino acid sequence

SEQ ID NO: 4851 - protein, 9 aa, Artificial Sequence
  Description of Artificial Sequence: Synthetic Heavy chain variable region CDR H1 amino acid sequence
FNIKDYYMH

SEQ ID NO: 4852 - DNA, 27 bp, Artificial Sequence
  Description of Artificial Sequence: Synthetic Heavy chain variable region CDR H1 nucleic acid sequence
ttcaacatcaaggactactatatgcac

SEQ ID NO: 4853 - protein, 17 aa, Artificial Sequence
  Description of Artificial Sequence: Synthetic Heavy chain variable region CDR H2 amino acid sequence
WIDLENGNTIYDPKFQG

SEQ ID NO: 4854 - DNA, 51 bp, Artificial Sequence; identical to SEQ ID NO: 3574
  Description of Artificial Sequence: Synthetic Heavy chain variable region CDR H2 nucleic acid sequence

SEQ ID NO: 4855 - protein, 12 aa, Artificial Sequence
  Description of Artificial Sequence: Synthetic Heavy chain variable region CDR H3 amino acid sequence
ARDGYGRYFYDV

SEQ ID NO: 4856 - DNA, 36 bp, Artificial Sequence; identical to SEQ ID NO: 4168
  Description of Artificial Sequence: Synthetic Heavy chain variable region CDR H3 nucleic acid sequence

SEQ ID NO: 4857 - DNA, 336 bp, Artificial Sequence; identical to SEQ ID NO: 3865
  Description of Artificial Sequence: Synthetic Light chain variable region nucleic acid sequence

SEQ ID NO: 4858 - protein, 112 aa, Artificial Sequence; identical to SEQ ID NO: 3866
  Description of Artificial Sequence: Synthetic Light chain variable region amino acid sequence

SEQ ID NO: 4859 - protein, 17 aa, Artificial Sequence
  Description of Artificial Sequence: Synthetic Light chain variable region CDR L1 amino acid sequence
KSSQSLLNSRTGKNYLA

SEQ ID NO: 4860 - DNA, 51 bp, Artificial Sequence; identical to SEQ ID NO: 3868
  Description of Artificial Sequence: Synthetic Light chain variable region CDR L1 nucleic acid sequence

SEQ ID NO: 4861 - protein, 7 aa, Artificial Sequence
  Description of Artificial Sequence: Synthetic Light chain variable region CDR L2 amino acid sequence
WASTRES

SEQ ID NO: 4862 - DNA, 21 bp, Artificial Sequence
  Description of Artificial Sequence: Synthetic Light chain variable region CDR L2 nucleic acid sequence
tgggcatctacccgggaatcc

SEQ ID NO: 4863 - protein, 8 aa, Artificial Sequence
  Description of Artificial Sequence: Synthetic Light chain variable region CDR L3 amino acid sequence
KQSYSRRT

SEQ ID NO: 4864 - DNA, 24 bp, Artificial Sequence
  Description of Artificial Sequence: Synthetic Light chain variable region CDR L3 nucleic acid sequence
aagcaatcttattctcggagaact

SEQ ID NO: 4865 - DNA, 357 bp, Artificial Sequence; identical to SEQ ID NO: 4161
  Description of Artificial Sequence: Synthetic Heavy chain variable region nucleic acid sequence

SEQ ID NO: 4866 - protein, 119 aa, Artificial Sequence; identical to SEQ ID NO: 4162
  Description of Artificial Sequence: Synthetic Heavy chain variable region amino acid sequence

SEQ ID NO: 4867 - protein, 9 aa, Artificial Sequence
  Description of Artificial Sequence: Synthetic Heavy chain variable region CDR H1 amino acid sequence
FNIKDYYMH

SEQ ID NO: 4868 - DNA, 27 bp, Artificial Sequence
  Description of Artificial Sequence: Synthetic Heavy chain variable region CDR H1 nucleic acid sequence
ttcaacatcaaggactactatatgcac

SEQ ID NO: 4869 - protein, 17 aa, Artificial Sequence
  Description of Artificial Sequence: Synthetic Heavy chain variable region CDR H2 amino acid sequence
WIDLENGNTIYDPKFQG

SEQ ID NO: 4870 - DNA, 51 bp, Artificial Sequence; identical to SEQ ID NO: 3574
  Description of Artificial Sequence: Synthetic Heavy chain variable region CDR H2 nucleic acid sequence

SEQ ID NO: 4871 - protein, 12 aa, Artificial Sequence
  Description of Artificial Sequence: Synthetic Heavy chain variable region CDR H3 amino acid sequence
ARDGYGRYFYDV

SEQ ID NO: 4872 - DNA, 36 bp, Artificial Sequence; identical to SEQ ID NO: 4168
  Description of Artificial Sequence: Synthetic Heavy chain variable region CDR H3 nucleic acid sequence

SEQ ID NO: 4873 - DNA, 336 bp, Artificial Sequence; identical to SEQ ID NO: 3865
  Description of Artificial Sequence: Synthetic Light chain variable region nucleic acid sequence

SEQ ID NO: 4874 - protein, 112 aa, Artificial Sequence; identical to SEQ ID NO: 3866
  Description of Artificial Sequence: Synthetic Light chain variable region amino acid sequence

SEQ ID NO: 4875 - protein, 17 aa, Artificial Sequence
  Description of Artificial Sequence: Synthetic Light chain variable region CDR L1 amino acid sequence
KSSQSLLNSRTGKNYLA

SEQ ID NO: 4876 - DNA, 51 bp, Artificial Sequence; identical to SEQ ID NO: 3868
  Description of Artificial Sequence: Synthetic Light chain variable region CDR L1 nucleic acid sequence

SEQ ID NO: 4877 - protein, 7 aa, Artificial Sequence
  Description of Artificial Sequence: Synthetic Light chain variable region CDR L2 amino acid sequence
WASTRES

SEQ ID NO: 4878 - DNA, 21 bp, Artificial Sequence
  Description of Artificial Sequence: Synthetic Light chain variable region CDR L2 nucleic acid sequence
tgggcatctacccgggaatcc

SEQ ID NO: 4879 - protein, 8 aa, Artificial Sequence
  Description of Artificial Sequence: Synthetic Light chain variable region CDR L3 amino acid sequence
KQSYSRRT

SEQ ID NO: 4880 - DNA, 24 bp, Artificial Sequence
  Description of Artificial Sequence: Synthetic Light chain variable region CDR L3 nucleic acid sequence
aagcaatcttattctcggagaact

SEQ ID NO: 4881 - DNA, 357 bp, Artificial Sequence; identical to SEQ ID NO: 4161
  Description of Artificial Sequence: Synthetic Heavy chain variable region nucleic acid sequence

SEQ ID NO: 4882 - protein, 119 aa, Artificial Sequence; identical to SEQ ID NO: 4162
  Description of Artificial Sequence: Synthetic Heavy chain variable region amino acid sequence

SEQ ID NO: 4883 - protein, 9 aa, Artificial Sequence
  Description of Artificial Sequence: Synthetic Heavy chain variable region CDR H1 amino acid sequence
FNIKDYYMH

SEQ ID NO: 4884 - DNA, 27 bp, Artificial Sequence
  Description of Artificial Sequence: Synthetic Heavy chain variable region CDR H1 nucleic acid sequence
ttcaacatcaaggactactatatgcac

SEQ ID NO: 4885 - protein, 17 aa, Artificial Sequence
  Description of Artificial Sequence: Synthetic Heavy chain variable region CDR H2 amino acid sequence
WIDLENGNTIYDPKFQG

SEQ ID NO: 4886 - DNA, 51 bp, Artificial Sequence; identical to SEQ ID NO: 3574
  Description of Artificial Sequence: Synthetic Heavy chain variable region CDR H2 nucleic acid sequence

SEQ ID NO: 4887 - protein, 12 aa, Artificial Sequence
  Description of Artificial Sequence: Synthetic Heavy chain variable region CDR H3 amino acid sequence
ARDGYGRYFYDV

SEQ ID NO: 4888 - DNA, 36 bp, Artificial Sequence; identical to SEQ ID NO: 4168
  Description of Artificial Sequence: Synthetic Heavy chain variable region CDR H3 nucleic acid sequence

SEQ ID NO: 4889 - DNA, 336 bp, Artificial Sequence; identical to SEQ ID NO: 3865
  Description of Artificial Sequence: Synthetic Light chain variable region nucleic acid sequence

SEQ ID NO: 4890 - protein, 112 aa, Artificial Sequence; identical to SEQ ID NO: 3866
  Description of Artificial Sequence: Synthetic Light chain variable region amino acid sequence

SEQ ID NO: 4891 - protein, 17 aa, Artificial Sequence
  Description of Artificial Sequence: Synthetic Light chain variable region CDR L1 amino acid sequence
KSSQSLLNSRTGKNYLA

SEQ ID NO: 4892 - DNA, 51 bp, Artificial Sequence; identical to SEQ ID NO: 3868
  Description of Artificial Sequence: Synthetic Light chain variable region CDR L1 nucleic acid sequence

SEQ ID NO: 4893 - protein, 7 aa, Artificial Sequence
  Description of Artificial Sequence: Synthetic Light chain variable region CDR L2 amino acid sequence
WASTRES

SEQ ID NO: 4894 - DNA, 21 bp, Artificial Sequence
  Description of Artificial Sequence: Synthetic Light chain variable region CDR L2 nucleic acid sequence
tgggcatctacccgggaatcc

SEQ ID NO: 4895 - protein, 8 aa, Artificial Sequence
  Description of Artificial Sequence: Synthetic Light chain variable region CDR L3 amino acid sequence
KQSYSRRT

SEQ ID NO: 4896 - DNA, 24 bp, Artificial Sequence
  Description of Artificial Sequence: Synthetic Light chain variable region CDR L3 nucleic acid sequence
aagcaatcttattctcggagaact

SEQ ID NO: 4897 - DNA, 357 bp, Artificial Sequence; identical to SEQ ID NO: 4161
  Description of Artificial Sequence: Synthetic Heavy chain variable region nucleic acid sequence

SEQ ID NO: 4898 - protein, 119 aa, Artificial Sequence; identical to SEQ ID NO: 4162
  Description of Artificial Sequence: Synthetic Heavy chain variable region amino acid sequence

SEQ ID NO: 4899 - protein, 9 aa, Artificial Sequence
  Description of Artificial Sequence: Synthetic Heavy chain variable region CDR H1 amino acid sequence
FNIKDYYMH

SEQ ID NO: 4900 - DNA, 27 bp, Artificial Sequence
  Description of Artificial Sequence: Synthetic Heavy chain variable region CDR H1 nucleic acid sequence
ttcaacatcaaggactactatatgcac

SEQ ID NO: 4901 - protein, 17 aa, Artificial Sequence
  Description of Artificial Sequence: Synthetic Heavy chain variable region CDR H2 amino acid sequence
WIDLENGNTIYDPKFQG

SEQ ID NO: 4902 - DNA, 51 bp, Artificial Sequence; identical to SEQ ID NO: 3574
  Description of Artificial Sequence: Synthetic Heavy chain variable region CDR H2 nucleic acid sequence

SEQ ID NO: 4903 - protein, 12 aa, Artificial Sequence
  Description of Artificial Sequence: Synthetic Heavy chain variable region CDR H3 amino acid sequence
ARDGYGRYFYDV

SEQ ID NO: 4904 - DNA, 36 bp, Artificial Sequence; identical to SEQ ID NO: 4168
  Description of Artificial Sequence: Synthetic Heavy chain variable region CDR H3 nucleic acid sequence

SEQ ID NO: 4905 - DNA, 336 bp, Artificial Sequence; identical to SEQ ID NO: 3865
  Description of Artificial Sequence: Synthetic Light chain variable region nucleic acid sequence

SEQ ID NO: 4906 - protein, 112 aa, Artificial Sequence; identical to SEQ ID NO: 3866
  Description of Artificial Sequence: Synthetic Light chain variable region amino acid sequence

SEQ ID NO: 4907 - protein, 17 aa, Artificial Sequence
  Description of Artificial Sequence: Synthetic Light chain variable region CDR L1 amino acid sequence
KSSQSLLNSRTGKNYLA

SEQ ID NO: 4908 - DNA, 51 bp, Artificial Sequence; identical to SEQ ID NO: 3868
  Description of Artificial Sequence: Synthetic Light chain variable region CDR L1 nucleic acid sequence

SEQ ID NO: 4909 - protein, 7 aa, Artificial Sequence
  Description of Artificial Sequence: Synthetic Light chain variable region CDR L2 amino acid sequence
WASTRES

SEQ ID NO: 4910 - DNA, 21 bp, Artificial Sequence
  Description of Artificial Sequence: Synthetic Light chain variable region CDR L2 nucleic acid sequence
tgggcatctacccgggaatcc

SEQ ID NO: 4911 - protein, 8 aa, Artificial Sequence
  Description of Artificial Sequence: Synthetic Light chain variable region CDR L3 amino acid sequence
KQSYSRRT

SEQ ID NO: 4912 - DNA, 24 bp, Artificial Sequence
  Description of Artificial Sequence: Synthetic Light chain variable region CDR L3 nucleic acid sequence
aagcaatcttattctcggagaact

SEQ ID NO: 4913 - DNA, 357 bp, Artificial Sequence; identical to SEQ ID NO: 4161
  Description of Artificial Sequence: Synthetic Heavy chain variable region nucleic acid sequence

SEQ ID NO: 4914 - protein, 119 aa, Artificial Sequence; identical to SEQ ID NO: 4162
  Description of Artificial Sequence: Synthetic Heavy chain variable region amino acid sequence

SEQ ID NO: 4915 - protein, 9 aa, Artificial Sequence
  Description of Artificial Sequence: Synthetic Heavy chain variable region CDR H1 amino acid sequence
FNIKDYYMH

SEQ ID NO: 4916 - DNA, 27 bp, Artificial Sequence
  Description of Artificial Sequence: Synthetic Heavy chain variable region CDR H1 nucleic acid sequence
ttcaacatcaaggactactatatgcac

SEQ ID NO: 4917 - protein, 17 aa, Artificial Sequence
  Description of Artificial Sequence: Synthetic Heavy chain variable region CDR H2 amino acid sequence
WIDLENGNTIYDPKFQG

SEQ ID NO: 4918 - DNA, 51 bp, Artificial Sequence; identical to SEQ ID NO: 3574
  Description of Artificial Sequence: Synthetic Heavy chain variable region CDR H2 nucleic acid sequence

SEQ ID NO: 4919 - protein, 12 aa, Artificial Sequence
  Description of Artificial Sequence: Synthetic Heavy chain variable region CDR H3 amino acid sequence
ARDGYGRYFYDV

SEQ ID NO: 4920 - DNA, 36 bp, Artificial Sequence; identical to SEQ ID NO: 4168
  Description of Artificial Sequence: Synthetic Heavy chain variable region CDR H3 nucleic acid sequence

SEQ ID NO: 4921 - DNA, 336 bp, Artificial Sequence; identical to SEQ ID NO: 3865
  Description of Artificial Sequence: Synthetic Light chain variable region nucleic acid sequence

SEQ ID NO: 4922 - protein, 112 aa, Artificial Sequence; identical to SEQ ID NO: 3866
  Description of Artificial Sequence: Synthetic Light chain variable region amino acid sequence

SEQ ID NO: 4923 - protein, 17 aa, Artificial Sequence
  Description of Artificial Sequence: Synthetic Light chain variable region CDR L1 amino acid sequence
KSSQSLLNSRTGKNYLA

SEQ ID NO: 4924 - DNA, 51 bp, Artificial Sequence; identical to SEQ ID NO: 3868
  Description of Artificial Sequence: Synthetic Light chain variable region CDR L1 nucleic acid sequence

SEQ ID NO: 4925 - protein, 7 aa, Artificial Sequence
  Description of Artificial Sequence: Synthetic Light chain variable region CDR L2 amino acid sequence
WASTRES

SEQ ID NO: 4926 - DNA, 21 bp, Artificial Sequence
  Description of Artificial Sequence: Synthetic Light chain variable region CDR L2 nucleic acid sequence
tgggcatctacccgggaatcc

SEQ ID NO: 4927 - protein, 8 aa, Artificial Sequence
  Description of Artificial Sequence: Synthetic Light chain variable region CDR L3 amino acid sequence
KQSYSRRT

SEQ ID NO: 4928 - DNA, 24 bp, Artificial Sequence
  Description of Artificial Sequence: Synthetic Light chain variable region CDR L3 nucleic acid sequence
aagcaatcttattctcggagaact

SEQ ID NO: 4929 - DNA, 357 bp, Artificial Sequence; identical to SEQ ID NO: 4161
  Description of Artificial Sequence: Synthetic Heavy chain variable region nucleic acid sequence

SEQ ID NO: 4930 - protein, 119 aa, Artificial Sequence; identical to SEQ ID NO: 4162
  Description of Artificial Sequence: Synthetic Heavy chain variable region amino acid sequence

SEQ ID NO: 4931 - protein, 9 aa, Artificial Sequence
  Description of Artificial Sequence: Synthetic Heavy chain variable region CDR H1 amino acid sequence
FNIKDYYMH

SEQ ID NO: 4932 - DNA, 27 bp, Artificial Sequence
  Description of Artificial Sequence: Synthetic Heavy chain variable region CDR H1 nucleic acid sequence
ttcaacatcaaggactactatatgcac

SEQ ID NO: 4933 - protein, 17 aa, Artificial Sequence
  Description of Artificial Sequence: Synthetic Heavy chain variable region CDR H2 amino acid sequence
WIDLENGNTIYDPKFQG

SEQ ID NO: 4934 - DNA, 51 bp, Artificial Sequence; identical to SEQ ID NO: 3574
  Description of Artificial Sequence: Synthetic Heavy chain variable region CDR H2 nucleic acid sequence

SEQ ID NO: 4935 - protein, 12 aa, Artificial Sequence
  Description of Artificial Sequence: Synthetic Heavy chain variable region CDR H3 amino acid sequence
ARDGYGRYFYDV

SEQ ID NO: 4936 - DNA, 36 bp, Artificial Sequence; identical to SEQ ID NO: 4168
  Description of Artificial Sequence: Synthetic Heavy chain variable region CDR H3 nucleic acid sequence

SEQ ID NO: 4937 - DNA, 336 bp, Artificial Sequence; identical to SEQ ID NO: 3865
  Description of Artificial Sequence: Synthetic Light chain variable region nucleic acid sequence

SEQ ID NO: 4938 - protein, 112 aa, Artificial Sequence; identical to SEQ ID NO: 3866
  Description of Artificial Sequence: Synthetic Light chain variable region amino acid sequence

SEQ ID NO: 4939 - protein, 17 aa, Artificial Sequence
  Description of Artificial Sequence: Synthetic Light chain variable region CDR L1 amino acid sequence
KSSQSLLNSRTGKNYLA

SEQ ID NO: 4940 - DNA, 51 bp, Artificial Sequence; identical to SEQ ID NO: 3868
  Description of Artificial Sequence: Synthetic Light chain variable region CDR L1 nucleic acid sequence

SEQ ID NO: 4941 - protein, 7 aa, Artificial Sequence
  Description of Artificial Sequence: Synthetic Light chain variable region CDR L2 amino acid sequence
WASTRES

SEQ ID NO: 4942 - DNA, 21 bp, Artificial Sequence
  Description of Artificial Sequence: Synthetic Light chain variable region CDR L2 nucleic acid sequence
tgggcatctacccgggaatcc

SEQ ID NO: 4943 - protein, 8 aa, Artificial Sequence
  Description of Artificial Sequence: Synthetic Light chain variable region CDR L3 amino acid sequence
KQSYSRRT

SEQ ID NO: 4944 - DNA, 24 bp, Artificial Sequence
  Description of Artificial Sequence: Synthetic Light chain variable region CDR L3 nucleic acid sequence
aagcaatcttattctcggagaact

SEQ ID NO: 4945 - DNA, 357 bp, Artificial Sequence
  Description of Artificial Sequence: Synthetic Heavy chain variable region nucleic acid sequence
caggtgcagctggtgcagtctggggctgaggtgaagaagcctggggcctcagtgaaggtctcctgcaaggcttctggattcaacatcaaggactactatatgcactgggtgcgacaggctcctggacaaaggcttgagtggatgggatggatcgaccttgaaaatggtaacacaatctatgacccgaagtttcagggcagggtcaccataaccagggacacgtccgccagcacagcctacatggagctgagcagcctgagatctgaagacacggcagtgtactactgcgcgagagatggatacgggagatatttttacgacgtgtggggccaaggaaccctggtcaccgtctcctca

SEQ ID NO: 4946 - protein, 119 aa, Artificial Sequence; identical to SEQ ID NO: 4162
  Description of Artificial Sequence: Synthetic Heavy chain variable region amino acid sequence

SEQ ID NO: 4947 - protein, 9 aa, Artificial Sequence
  Description of Artificial Sequence: Synthetic Heavy chain variable region CDR H1 amino acid sequence
FNIKDYYMH

SEQ ID NO: 4948 - DNA, 27 bp, Artificial Sequence
  Description of Artificial Sequence: Synthetic Heavy chain variable region CDR H1 nucleic acid sequence
ttcaacatcaaggactactatatgcac

SEQ ID NO: 4949 - protein, 17 aa, Artificial Sequence
  Description of Artificial Sequence: Synthetic Heavy chain variable region CDR H2 amino acid sequence
WIDLENGNTIYDPKFQG

SEQ ID NO: 4950 - DNA, 51 bp, Artificial Sequence; identical to SEQ ID NO: 3574
  Description of Artificial Sequence: Synthetic Heavy chain variable region CDR H2 nucleic acid sequence

SEQ ID NO: 4951 - protein, 12 aa, Artificial Sequence
  Description of Artificial Sequence: Synthetic Heavy chain variable region CDR H3 amino acid sequence
ARDGYGRYFYDV

SEQ ID NO: 4952 - DNA, 36 bp, Artificial Sequence; identical to SEQ ID NO: 4168
  Description of Artificial Sequence: Synthetic Heavy chain variable region CDR H3 nucleic acid sequence

SEQ ID NO: 4953 - DNA, 336 bp, Artificial Sequence; identical to SEQ ID NO: 3865
  Description of Artificial Sequence: Synthetic Light chain variable region nucleic acid sequence

SEQ ID NO: 4954 - protein, 112 aa, Artificial Sequence; identical to SEQ ID NO: 3866
  Description of Artificial Sequence: Synthetic Light chain variable region amino acid sequence

SEQ ID NO: 4955 - protein, 17 aa, Artificial Sequence
  Description of Artificial Sequence: Synthetic Light chain variable region CDR L1 amino acid sequence
KSSQSLLNSRTGKNYLA

SEQ ID NO: 4956 - DNA, 51 bp, Artificial Sequence; identical to SEQ ID NO: 3868
  Description of Artificial Sequence: Synthetic Light chain variable region CDR L1 nucleic acid sequence

SEQ ID NO: 4957 - protein, 7 aa, Artificial Sequence
  Description of Artificial Sequence: Synthetic Light chain variable region CDR L2 amino acid sequence
WASTRES

SEQ ID NO: 4958 - DNA, 21 bp, Artificial Sequence
  Description of Artificial Sequence: Synthetic Light chain variable region CDR L2 nucleic acid sequence
tgggcatctacccgggaatcc

SEQ ID NO: 4959 - protein, 8 aa, Artificial Sequence
  Description of Artificial Sequence: Synthetic Light chain variable region CDR L3 amino acid sequence
KQSYSRRT

SEQ ID NO: 4960 - DNA, 24 bp, Artificial Sequence
  Description of Artificial Sequence: Synthetic Light chain variable region CDR L3 nucleic acid sequence
aagcaatcttattctcggagaact

SEQ ID NO: 4961 - DNA, 357 bp, Artificial Sequence
  Description of Artificial Sequence: Synthetic Heavy chain variable region nucleic acid sequence
caggtgcagctggtgcagtctggggctgaggtgaagaagcctggggcctcagtgaaggtctcctgcaaggcttctggattcaacatcaaggactactatatgcactgggtgcgacaggctcctggacaatgtcttgagtggatgggatggatcgaccttgaaaatggtaacacaatctatgacccgaagtttcagggcagggtcaccataaccagggacacgtccgccagcacagcctacatggagctgagcagcctgagatctgaagacacggcggtgtactactgcgcgagagatggatacgggagatatttttacgacgtgtggggccaaggaaccctggtcaccgtctcctca

SEQ ID NO: 4962 - protein, 119 aa, Artificial Sequence
  Description of Artificial Sequence: Synthetic Heavy chain variable region amino acid sequence
QVQLVQSGAEVKKPGASVKVSCKASGFNIKDYYMHWVRQAPGQCLEWMGWIDLENGNTIYDPKFQGRVTITRDTSASTAYMELSSLRSEDTAVYYCARDGYGRYFYDVWGQGTLVTVSS

SEQ ID NO: 4963 - protein, 9 aa, Artificial Sequence
  Description of Artificial Sequence: Synthetic Heavy chain variable region CDR H1 amino acid sequence
FNIKDYYMH

SEQ ID NO: 4964 - DNA, 27 bp, Artificial Sequence
  Description of Artificial Sequence: Synthetic Heavy chain variable region CDR H1 nucleic acid sequence
ttcaacatcaaggactactatatgcac

SEQ ID NO: 4965 - protein, 17 aa, Artificial Sequence
  Description of Artificial Sequence: Synthetic Heavy chain variable region CDR H2 amino acid sequence
WIDLENGNTIYDPKFQG

SEQ ID NO: 4966 - DNA, 51 bp, Artificial Sequence; identical to SEQ ID NO: 3574
  Description of Artificial Sequence: Synthetic Heavy chain variable region CDR H2 nucleic acid sequence

SEQ ID NO: 4967 - protein, 12 aa, Artificial Sequence
  Description of Artificial Sequence: Synthetic Heavy chain variable region CDR H3 amino acid sequence
ARDGYGRYFYDV

SEQ ID NO: 4968 - DNA, 36 bp, Artificial Sequence; identical to SEQ ID NO: 4168
  Description of Artificial Sequence: Synthetic Heavy chain variable region CDR H3 nucleic acid sequence

SEQ ID NO: 4969 - DNA, 336 bp, Artificial Sequence
  Description of Artificial Sequence: Synthetic Light chain variable region nucleic acid sequence
gacatcgtgatgacccagtctccagactccctggctgtgtctctgggcgagagggccaccatcaactgcaagtccagccagagtcttttaaacagcagaaccggaaagaactacttagcttggtaccagcagaaaccaggacagcctcctaagctgctcatttactgggcatctacccgggaatccggggtccctgaccgattcagtggcagcgggtctgggacagacttcactctcactatcagtagcctgcaggctgaagatgtggcagtttattactgtaagcaatcttattctcggagaactttcggctgtgggaccaaggtcgagatcaaa

SEQ ID NO: 4970 - protein, 112 aa, Artificial Sequence
  Description of Artificial Sequence: Synthetic Light chain variable region amino acid sequence
DIVMTQSPDSLAVSLGERATINCKSSQSLLNSRTGKNYLAWYQQKPGQPPKLLIYWASTRESGVPDRFSGSGSGTDFTLTISSLQAEDVAVYYCKQSYSRRTFGCGTKVEIK

SEQ ID NO: 4971 - protein, 17 aa, Artificial Sequence
  Description of Artificial Sequence: Synthetic Light chain variable region CDR L1 amino acid sequence
KSSQSLLNSRTGKNYLA

SEQ ID NO: 4972 - DNA, 51 bp, Artificial Sequence; identical to SEQ ID NO: 3868
  Description of Artificial Sequence: Synthetic Light chain variable region CDR L1 nucleic acid sequence

SEQ ID NO: 4973 - protein, 7 aa, Artificial Sequence
  Description of Artificial Sequence: Synthetic Light chain variable region CDR L2 amino acid sequence
WASTRES

SEQ ID NO: 4974 - DNA, 21 bp, Artificial Sequence
  Description of Artificial Sequence: Synthetic Light chain variable region CDR L2 nucleic acid sequence
tgggcatctacccgggaatcc

SEQ ID NO: 4975 - protein, 8 aa, Artificial Sequence
  Description of Artificial Sequence: Synthetic Light chain variable region CDR L3 amino acid sequence
KQSYSRRT

SEQ ID NO: 4976 - DNA, 24 bp, Artificial Sequence
  Description of Artificial Sequence: Synthetic Light chain variable region CDR L3 nucleic acid sequence
aagcaatcttattctcggagaact

SEQ ID NO: 4977 - DNA, 357 bp, Artificial Sequence; identical to SEQ ID NO: 4961
  Description of Artificial Sequence: Synthetic Heavy chain variable region nucleic acid sequence

SEQ ID NO: 4978 - protein, 119 aa, Artificial Sequence; identical to SEQ ID NO: 4962
  Description of Artificial Sequence: Synthetic Heavy chain variable region amino acid sequence

SEQ ID NO: 4979 - protein, 9 aa, Artificial Sequence
  Description of Artificial Sequence: Synthetic Heavy chain variable region CDR H1 amino acid sequence
FNIKDYYMH

SEQ ID NO: 4980 - DNA, 27 bp, Artificial Sequence
  Description of Artificial Sequence: Synthetic Heavy chain variable region CDR H1 nucleic acid sequence
ttcaacatcaaggactactatatgcac

SEQ ID NO: 4981 - protein, 17 aa, Artificial Sequence
  Description of Artificial Sequence: Synthetic Heavy chain variable region CDR H2 amino acid sequence
WIDLENGNTIYDPKFQG

SEQ ID NO: 4982 - DNA, 51 bp, Artificial Sequence; identical to SEQ ID NO: 3574
  Description of Artificial Sequence: Synthetic Heavy chain variable region CDR H2 nucleic acid sequence

SEQ ID NO: 4983 - protein, 12 aa, Artificial Sequence
  Description of Artificial Sequence: Synthetic Heavy chain variable region CDR H3 amino acid sequence
ARDGYGRYFYDV

SEQ ID NO: 4984 - DNA, 36 bp, Artificial Sequence; identical to SEQ ID NO: 4168
  Description of Artificial Sequence: Synthetic Heavy chain variable region CDR H3 nucleic acid sequence

SEQ ID NO: 4985 - DNA, 336 bp, Artificial Sequence; identical to SEQ ID NO: 4969
  Description of Artificial Sequence: Synthetic Light chain variable region nucleic acid sequence

SEQ ID NO: 4986 - protein, 112 aa, Artificial Sequence; identical to SEQ ID NO: 4970
  Description of Artificial Sequence: Synthetic Light chain variable region amino acid sequence

SEQ ID NO: 4987 - protein, 17 aa, Artificial Sequence
  Description of Artificial Sequence: Synthetic Light chain variable region CDR L1 amino acid sequence
KSSQSLLNSRTGKNYLA

SEQ ID NO: 4988 - DNA, 51 bp, Artificial Sequence; identical to SEQ ID NO: 3868
  Description of Artificial Sequence: Synthetic Light chain variable region CDR L1 nucleic acid sequence

SEQ ID NO: 4989 - protein, 7 aa, Artificial Sequence
  Description of Artificial Sequence: Synthetic Light chain variable region CDR L2 amino acid sequence
WASTRES

SEQ ID NO: 4990 - DNA, 21 bp, Artificial Sequence
  Description of Artificial Sequence: Synthetic Light chain variable region CDR L2 nucleic acid sequence
tgggcatctacccgggaatcc

SEQ ID NO: 4991 - protein, 8 aa, Artificial Sequence
  Description of Artificial Sequence: Synthetic Light chain variable region CDR L3 amino acid sequence
KQSYSRRT

SEQ ID NO: 4992 - DNA, 24 bp, Artificial Sequence
  Description of Artificial Sequence: Synthetic Light chain variable region CDR L3 nucleic acid sequence
aagcaatcttattctcggagaact

SEQ ID NO: 4993 - DNA, 357 bp, Artificial Sequence; identical to SEQ ID NO: 4961
  Description of Artificial Sequence: Synthetic Heavy chain variable region nucleic acid sequence

SEQ ID NO: 4994 - protein, 119 aa, Artificial Sequence; identical to SEQ ID NO: 4962
  Description of Artificial Sequence: Synthetic Heavy chain variable region amino acid sequence

SEQ ID NO: 4995 - protein, 9 aa, Artificial Sequence
  Description of Artificial Sequence: Synthetic Heavy chain variable region CDR H1 amino acid sequence
FNIKDYYMH

SEQ ID NO: 4996 - DNA, 27 bp, Artificial Sequence
  Description of Artificial Sequence: Synthetic Heavy chain variable region CDR H1 nucleic acid sequence
ttcaacatcaaggactactatatgcac

SEQ ID NO: 4997 - protein, 17 aa, Artificial Sequence
  Description of Artificial Sequence: Synthetic Heavy chain variable region CDR H2 amino acid sequence
WIDLENGNTIYDPKFQG

SEQ ID NO: 4998 - DNA, 51 bp, Artificial Sequence; identical to SEQ ID NO: 3574
  Description of Artificial Sequence: Synthetic Heavy chain variable region CDR H2 nucleic acid sequence

SEQ ID NO: 4999 - protein, 12 aa, Artificial Sequence
  Description of Artificial Sequence: Synthetic Heavy chain variable region CDR H3 amino acid sequence
ARDGYGRYFYDV

SEQ ID NO: 5000 - DNA, 36 bp, Artificial Sequence; identical to SEQ ID NO: 4168
  Description of Artificial Sequence: Synthetic Heavy chain variable region CDR H3 nucleic acid sequence

SEQ ID NO: 5001 - DNA, 336 bp, Artificial Sequence; identical to SEQ ID NO: 4969
  Description of Artificial Sequence: Synthetic Light chain variable region nucleic acid sequence

SEQ ID NO: 5002 - protein, 112 aa, Artificial Sequence; identical to SEQ ID NO: 4970
  Description of Artificial Sequence: Synthetic Light chain variable region amino acid sequence

SEQ ID NO: 5003 - protein, 17 aa, Artificial Sequence
  Description of Artificial Sequence: Synthetic Light chain variable region CDR L1 amino acid sequence
KSSQSLLNSRTGKNYLA

SEQ ID NO: 5004 - DNA, 51 bp, Artificial Sequence; identical to SEQ ID NO: 3868
  Description of Artificial Sequence: Synthetic Light chain variable region CDR L1 nucleic acid sequence

SEQ ID NO: 5005 - protein, 7 aa, Artificial Sequence
  Description of Artificial Sequence: Synthetic Light chain variable region CDR L2 amino acid sequence
WASTRES

SEQ ID NO: 5006 - DNA, 21 bp, Artificial Sequence
  Description of Artificial Sequence: Synthetic Light chain variable region CDR L2 nucleic acid sequence
tgggcatctacccgggaatcc

SEQ ID NO: 5007 - protein, 8 aa, Artificial Sequence
  Description of Artificial Sequence: Synthetic Light chain variable region CDR L3 amino acid sequence
KQSYSRRT

SEQ ID NO: 5008 - DNA, 24 bp, Artificial Sequence
  Description of Artificial Sequence: Synthetic Light chain variable region CDR L3 nucleic acid sequence
aagcaatcttattctcggagaact

SEQ ID NO: 5009 - DNA, 357 bp, Artificial Sequence; identical to SEQ ID NO: 4961
  Description of Artificial Sequence: Synthetic Heavy chain variable region nucleic acid sequence

SEQ ID NO: 5010 - protein, 119 aa, Artificial Sequence; identical to SEQ ID NO: 4962
  Description of Artificial Sequence: Synthetic Heavy chain variable region amino acid sequence

SEQ ID NO: 5011 - protein, 9 aa, Artificial Sequence
  Description of Artificial Sequence: Synthetic Heavy chain variable region CDR H1 amino acid sequence
FNIKDYYMH

SEQ ID NO: 5012 - DNA, 27 bp, Artificial Sequence
  Description of Artificial Sequence: Synthetic Heavy chain variable region CDR H1 nucleic acid sequence
ttcaacatcaaggactactatatgcac

SEQ ID NO: 5013 - protein, 17 aa, Artificial Sequence
  Description of Artificial Sequence: Synthetic Heavy chain variable region CDR H2 amino acid sequence
WIDLENGNTIYDPKFQG

SEQ ID NO: 5014 - DNA, 51 bp, Artificial Sequence; identical to SEQ ID NO: 3574
  Description of Artificial Sequence: Synthetic Heavy chain variable region CDR H2 nucleic acid sequence

SEQ ID NO: 5015 - protein, 12 aa, Artificial Sequence
  Description of Artificial Sequence: Synthetic Heavy chain variable region CDR H3 amino acid sequence
ARDGYGRYFYDV

SEQ ID NO: 5016 - DNA, 36 bp, Artificial Sequence; identical to SEQ ID NO: 4168
  Description of Artificial Sequence: Synthetic Heavy chain variable region CDR H3 nucleic acid sequence

SEQ ID NO: 5017 - DNA, 336 bp, Artificial Sequence; identical to SEQ ID NO: 4969
  Description of Artificial Sequence: Synthetic Light chain variable region nucleic acid sequence

SEQ ID NO: 5018 - protein, 112 aa, Artificial Sequence; identical to SEQ ID NO: 4970
  Description of Artificial Sequence: Synthetic Light chain variable region amino acid sequence

SEQ ID NO: 5019 - protein, 17 aa, Artificial Sequence
  Description of Artificial Sequence: Synthetic Light chain variable region CDR L1 amino acid sequence
KSSQSLLNSRTGKNYLA

SEQ ID NO: 5020 - DNA, 51 bp, Artificial Sequence; identical to SEQ ID NO: 3868
  Description of Artificial Sequence: Synthetic Light chain variable region CDR L1 nucleic acid sequence

SEQ ID NO: 5021 - protein, 7 aa, Artificial Sequence
  Description of Artificial Sequence: Synthetic Light chain variable region CDR L2 amino acid sequence
WASTRES

SEQ ID NO: 5022 - DNA, 21 bp, Artificial Sequence
  Description of Artificial Sequence: Synthetic Light chain variable region CDR L2 nucleic acid sequence
tgggcatctacccgggaatcc

SEQ ID NO: 5023 - protein, 8 aa, Artificial Sequence
  Description of Artificial Sequence: Synthetic Light chain variable region CDR L3 amino acid sequence
KQSYSRRT

SEQ ID NO: 5024 - DNA, 24 bp, Artificial Sequence
  Description of Artificial Sequence: Synthetic Light chain variable region CDR L3 nucleic acid sequence
aagcaatcttattctcggagaact

SEQ ID NO: 5025 - DNA, 357 bp, Artificial Sequence; identical to SEQ ID NO: 4961
  Description of Artificial Sequence: Synthetic Heavy chain variable region nucleic acid sequence

SEQ ID NO: 5026 - protein, 119 aa, Artificial Sequence; identical to SEQ ID NO: 4962
  Description of Artificial Sequence: Synthetic Heavy chain variable region amino acid sequence

SEQ ID NO: 5027 - protein, 9 aa, Artificial Sequence
  Description of Artificial Sequence: Synthetic Heavy chain variable region CDR H1 amino acid sequence
FNIKDYYMH

SEQ ID NO: 5028 - DNA, 27 bp, Artificial Sequence
  Description of Artificial Sequence: Synthetic Heavy chain variable region CDR H1 nucleic acid sequence
ttcaacatcaaggactactatatgcac

SEQ ID NO: 5029 - protein, 17 aa, Artificial Sequence
  Description of Artificial Sequence: Synthetic Heavy chain variable region CDR H2 amino acid sequence
WIDLENGNTIYDPKFQG

SEQ ID NO: 5030 - DNA, 51 bp, Artificial Sequence; identical to SEQ ID NO: 3574
  Description of Artificial Sequence: Synthetic Heavy chain variable region CDR H2 nucleic acid sequence

SEQ ID NO: 5031 - protein, 12 aa, Artificial Sequence
  Description of Artificial Sequence: Synthetic Heavy chain variable region CDR H3 amino acid sequence
ARDGYGRYFYDV

SEQ ID NO: 5032 - DNA, 36 bp, Artificial Sequence; identical to SEQ ID NO: 4168
  Description of Artificial Sequence: Synthetic Heavy chain variable region CDR H3 nucleic acid sequence

SEQ ID NO: 5033 - DNA, 336 bp, Artificial Sequence; identical to SEQ ID NO: 4969
  Description of Artificial Sequence: Synthetic Light chain variable region nucleic acid sequence

SEQ ID NO: 5034 - protein, 112 aa, Artificial Sequence; identical to SEQ ID NO: 4970
  Description of Artificial Sequence: Synthetic Light chain variable region amino acid sequence

SEQ ID NO: 5035 - protein, 17 aa, Artificial Sequence
  Description of Artificial Sequence: Synthetic Light chain variable region CDR L1 amino acid sequence
KSSQSLLNSRTGKNYLA

SEQ ID NO: 5036 - DNA, 51 bp, Artificial Sequence; identical to SEQ ID NO: 3868
  Description of Artificial Sequence: Synthetic Light chain variable region CDR L1 nucleic acid sequence

SEQ ID NO: 5037 - protein, 7 aa, Artificial Sequence
  Description of Artificial Sequence: Synthetic Light chain variable region CDR L2 amino acid sequence
WASTRES

SEQ ID NO: 5038 - DNA, 21 bp, Artificial Sequence
  Description of Artificial Sequence: Synthetic Light chain variable region CDR L2 nucleic acid sequence
tgggcatctacccgggaatcc

SEQ ID NO: 5039 - protein, 8 aa, Artificial Sequence
  Description of Artificial Sequence: Synthetic Light chain variable region CDR L3 amino acid sequence
KQSYSRRT

SEQ ID NO: 5040 - DNA, 24 bp, Artificial Sequence
  Description of Artificial Sequence: Synthetic Light chain variable region CDR L3 nucleic acid sequence
aagcaatcttattctcggagaact

SEQ ID NO: 5041 - DNA, 357 bp, Artificial Sequence
  Description of Artificial Sequence: Synthetic Heavy chain variable region nucleic acid sequence
caggtgcagctggtgcagtctggggctgaggtgaagaagcctggggcctcagtgaaggtctcctgcaaggcttctggattcaacatcaaggactactatatgcactgggtgcgacaggctcctggacaatgtcttgagtggatgggatggatcgaccttgaaaatggtaacacaatctatgacccgatgtttcagggcagggtcaccataaccagggacacgtccgccagcacagcctacatggagctgagcagcctgagatctgaagacacggcggtgtactactgcgcgagagatggatacgggagatatttttacgacgtgtggggccaaggaaccctggtcaccgtctcctca

SEQ ID NO: 5042 - protein, 119 aa, Artificial Sequence
  Description of Artificial Sequence: Synthetic Heavy chain variable region amino acid sequence
QVQLVQSGAEVKKPGASVKVSCKASGFNIKDYYMHWVRQAPGQCLEWMGWIDLENGNTIYDPMFQGRVTITRDTSASTAYMELSSLRSEDTAVYYCARDGYGRYFYDVWGQGTLVTVSS

SEQ ID NO: 5043 - protein, 9 aa, Artificial Sequence
  Description of Artificial Sequence: Synthetic Heavy chain variable region CDR H1 amino acid sequence
FNIKDYYMH

SEQ ID NO: 5044 - DNA, 27 bp, Artificial Sequence
  Description of Artificial Sequence: Synthetic Heavy chain variable region CDR H1 nucleic acid sequence
ttcaacatcaaggactactatatgcac

SEQ ID NO: 5045 - protein, 17 aa, Artificial Sequence
  Description of Artificial Sequence: Synthetic Heavy chain variable region CDR H2 amino acid sequence
WIDLENGNTIYDPMFQG

SEQ ID NO: 5046 - DNA, 51 bp, Artificial Sequence
  Description of Artificial Sequence: Synthetic Heavy chain variable region CDR H2 nucleic acid sequence
tggatcgaccttgaaaatggtaacacaatctatgacccgatgtttcagggc

SEQ ID NO: 5047 - protein, 12 aa, Artificial Sequence
  Description of Artificial Sequence: Synthetic Heavy chain variable region CDR H3 amino acid sequence
ARDGYGRYFYDV

SEQ ID NO: 5048 - DNA, 36 bp, Artificial Sequence; identical to SEQ ID NO: 4168
  Description of Artificial Sequence: Synthetic Heavy chain variable region CDR H3 nucleic acid sequence

SEQ ID NO: 5049 - DNA, 336 bp, Artificial Sequence; identical to SEQ ID NO: 4969
  Description of Artificial Sequence: Synthetic Light chain variable region nucleic acid sequence

SEQ ID NO: 5050 - protein, 112 aa, Artificial Sequence; identical to SEQ ID NO: 4970
  Description of Artificial Sequence: Synthetic Light chain variable region amino acid sequence

SEQ ID NO: 5051 - protein, 17 aa, Artificial Sequence
  Description of Artificial Sequence: Synthetic Light chain variable region CDR L1 amino acid sequence
KSSQSLLNSRTGKNYLA

SEQ ID NO: 5052 - DNA, 51 bp, Artificial Sequence; identical to SEQ ID NO: 3868
  Description of Artificial Sequence: Synthetic Light chain variable region CDR L1 nucleic acid sequence

SEQ ID NO: 5053 - protein, 7 aa, Artificial Sequence
  Description of Artificial Sequence: Synthetic Light chain variable region CDR L2 amino acid sequence
WASTRES

SEQ ID NO: 5054 - DNA, 21 bp, Artificial Sequence
  Description of Artificial Sequence: Synthetic Light chain variable region CDR L2 nucleic acid sequence
tgggcatctacccgggaatcc

SEQ ID NO: 5055 - protein, 8 aa, Artificial Sequence
  Description of Artificial Sequence: Synthetic Light chain variable region CDR L3 amino acid sequence
KQSYSRRT

SEQ ID NO: 5056 - DNA, 24 bp, Artificial Sequence
  Description of Artificial Sequence: Synthetic Light chain variable region CDR L3 nucleic acid sequence
aagcaatcttattctcggagaact

SEQ ID NO: 5057 - DNA, 357 bp, Artificial Sequence; identical to SEQ ID NO: 4961
  Description of Artificial Sequence: Synthetic Heavy chain variable region nucleic acid sequence

SEQ ID NO: 5058 - protein, 119 aa, Artificial Sequence; identical to SEQ ID NO: 4962
  Description of Artificial Sequence: Synthetic Heavy chain variable region amino acid sequence

SEQ ID NO: 5059 - protein, 9 aa, Artificial Sequence
  Description of Artificial Sequence: Synthetic Heavy chain variable region CDR H1 amino acid sequence
FNIKDYYMH

SEQ ID NO: 5060 - DNA, 27 bp, Artificial Sequence
  Description of Artificial Sequence: Synthetic Heavy chain variable region CDR H1 nucleic acid sequence
ttcaacatcaaggactactatatgcac

SEQ ID NO: 5061 - protein, 17 aa, Artificial Sequence
  Description of Artificial Sequence: Synthetic Heavy chain variable region CDR H2 amino acid sequence
WIDLENGNTIYDPKFQG

SEQ ID NO: 5062 - DNA, 51 bp, Artificial Sequence; identical to SEQ ID NO: 3574
  Description of Artificial Sequence: Synthetic Heavy chain variable region CDR H2 nucleic acid sequence

SEQ ID NO: 5063 - protein, 12 aa, Artificial Sequence
  Description of Artificial Sequence: Synthetic Heavy chain variable region CDR H3 amino acid sequence
ARDGYGRYFYDV

SEQ ID NO: 5064 - DNA, 36 bp, Artificial Sequence; identical to SEQ ID NO: 4168
  Description of Artificial Sequence: Synthetic Heavy chain variable region CDR H3 nucleic acid sequence

SEQ ID NO: 5065 - DNA, 336 bp, Artificial Sequence; identical to SEQ ID NO: 4969
  Description of Artificial Sequence: Synthetic Light chain variable region nucleic acid sequence

SEQ ID NO: 5066 - protein, 112 aa, Artificial Sequence; identical to SEQ ID NO: 4970
  Description of Artificial Sequence: Synthetic Light chain variable region amino acid sequence

SEQ ID NO: 5067 - protein, 17 aa, Artificial Sequence
  Description of Artificial Sequence: Synthetic Light chain variable region CDR L1 amino acid sequence
KSSQSLLNSRTGKNYLA

SEQ ID NO: 5068 - DNA, 51 bp, Artificial Sequence; identical to SEQ ID NO: 3868
  Description of Artificial Sequence: Synthetic Light chain variable region CDR L1 nucleic acid sequence

SEQ ID NO: 5069 - protein, 7 aa, Artificial Sequence
  Description of Artificial Sequence: Synthetic Light chain variable region CDR L2 amino acid sequence
WASTRES

SEQ ID NO: 5070 - DNA, 21 bp, Artificial Sequence
  Description of Artificial Sequence: Synthetic Light chain variable region CDR L2 nucleic acid sequence
tgggcatctacccgggaatcc

SEQ ID NO: 5071 - protein, 8 aa, Artificial Sequence
  Description of Artificial Sequence: Synthetic Light chain variable region CDR L3 amino acid sequence
KQSYSRRT

SEQ ID NO: 5072 - DNA, 24 bp, Artificial Sequence
  Description of Artificial Sequence: Synthetic Light chain variable region CDR L3 nucleic acid sequence
aagcaatcttattctcggagaact

SEQ ID NO: 5073 - DNA, 357 bp, Artificial Sequence; identical to SEQ ID NO: 4961
  Description of Artificial Sequence: Synthetic Heavy chain variable region nucleic acid sequence

SEQ ID NO: 5074 - protein, 119 aa, Artificial Sequence; identical to SEQ ID NO: 4962
  Description of Artificial Sequence: Synthetic Heavy chain variable region amino acid sequence

SEQ ID NO: 5075 - protein, 9 aa, Artificial Sequence
  Description of Artificial Sequence: Synthetic Heavy chain variable region CDR H1 amino acid sequence
FNIKDYYMH

SEQ ID NO: 5076 - DNA, 27 bp, Artificial Sequence
  Description of Artificial Sequence: Synthetic Heavy chain variable region CDR H1 nucleic acid sequence
ttcaacatcaaggactactatatgcac

SEQ ID NO: 5077 - protein, 17 aa, Artificial Sequence
  Description of Artificial Sequence: Synthetic Heavy chain variable region CDR H2 amino acid sequence
WIDLENGNTIYDPKFQG

SEQ ID NO: 5078 - DNA, 51 bp, Artificial Sequence; identical to SEQ ID NO: 3574
  Description of Artificial Sequence: Synthetic Heavy chain variable region CDR H2 nucleic acid sequence

SEQ ID NO: 5079 - protein, 12 aa, Artificial Sequence
  Description of Artificial Sequence: Synthetic Heavy chain variable region CDR H3 amino acid sequence
ARDGYGRYFYDV

SEQ ID NO: 5080 - DNA, 36 bp, Artificial Sequence; identical to SEQ ID NO: 4168
  Description of Artificial Sequence: Synthetic Heavy chain variable region CDR H3 nucleic acid sequence

SEQ ID NO: 5081 - DNA, 336 bp, Artificial Sequence; identical to SEQ ID NO: 4969
  Description of Artificial Sequence: Synthetic Light chain variable region nucleic acid sequence

SEQ ID NO: 5082 - protein, 112 aa, Artificial Sequence; identical to SEQ ID NO: 4970
  Description of Artificial Sequence: Synthetic Light chain variable region amino acid sequence

SEQ ID NO: 5083 - protein, 17 aa, Artificial Sequence
  Description of Artificial Sequence: Synthetic Light chain variable region CDR L1 amino acid sequence
KSSQSLLNSRTGKNYLA

SEQ ID NO: 5084 - DNA, 51 bp, Artificial Sequence; identical to SEQ ID NO: 3868
  Description of Artificial Sequence: Synthetic Light chain variable region CDR L1 nucleic acid sequence

SEQ ID NO: 5085 - protein, 7 aa, Artificial Sequence
  Description of Artificial Sequence: Synthetic Light chain variable region CDR L2 amino acid sequence
WASTRES

SEQ ID NO: 5086 - DNA, 21 bp, Artificial Sequence
  Description of Artificial Sequence: Synthetic Light chain variable region CDR L2 nucleic acid sequence
tgggcatctacccgggaatcc

SEQ ID NO: 5087 - protein, 8 aa, Artificial Sequence
  Description of Artificial Sequence: Synthetic Light chain variable region CDR L3 amino acid sequence
KQSYSRRT

SEQ ID NO: 5088 - DNA, 24 bp, Artificial Sequence
  Description of Artificial Sequence: Synthetic Light chain variable region CDR L3 nucleic acid sequence
aagcaatcttattctcggagaact

SEQ ID NO: 5089 - DNA, 357 bp, Artificial Sequence; identical to SEQ ID NO: 4961
  Description of Artificial Sequence: Synthetic Heavy chain variable region nucleic acid sequence

SEQ ID NO: 5090 - protein, 119 aa, Artificial Sequence; identical to SEQ ID NO: 4962
  Description of Artificial Sequence: Synthetic Heavy chain variable region amino acid sequence

SEQ ID NO: 5091 - protein, 9 aa, Artificial Sequence
  Description of Artificial Sequence: Synthetic Heavy chain variable region CDR H1 amino acid sequence
FNIKDYYMH

SEQ ID NO: 5092 - DNA, 27 bp, Artificial Sequence
  Description of Artificial Sequence: Synthetic Heavy chain variable region CDR H1 nucleic acid sequence
ttcaacatcaaggactactatatgcac

SEQ ID NO: 5093 - protein, 17 aa, Artificial Sequence
  Description of Artificial Sequence: Synthetic Heavy chain variable region CDR H2 amino acid sequence
WIDLENGNTIYDPKFQG

SEQ ID NO: 5094 - DNA, 51 bp, Artificial Sequence; identical to SEQ ID NO: 3574
  Description of Artificial Sequence: Synthetic Heavy chain variable region CDR H2 nucleic acid sequence

SEQ ID NO: 5095 - protein, 12 aa, Artificial Sequence
  Description of Artificial Sequence: Synthetic Heavy chain variable region CDR H3 amino acid sequence
ARDGYGRYFYDV

SEQ ID NO: 5096 - DNA, 36 bp, Artificial Sequence; identical to SEQ ID NO: 4168
  Description of Artificial Sequence: Synthetic Heavy chain variable region CDR H3 nucleic acid sequence

SEQ ID NO: 5097 - DNA, 336 bp, Artificial Sequence; identical to SEQ ID NO: 4969
  Description of Artificial Sequence: Synthetic Light chain variable region nucleic acid sequence

SEQ ID NO: 5098 - protein, 112 aa, Artificial Sequence; identical to SEQ ID NO: 4970
  Description of Artificial Sequence: Synthetic Light chain variable region amino acid sequence

SEQ ID NO: 5099 - protein, 17 aa, Artificial Sequence
  Description of Artificial Sequence: Synthetic Light chain variable region CDR L1 amino acid sequence
KSSQSLLNSRTGKNYLA

SEQ ID NO: 5100 - DNA, 51 bp, Artificial Sequence; identical to SEQ ID NO: 3868
  Description of Artificial Sequence: Synthetic Light chain variable region CDR L1 nucleic acid sequence

SEQ ID NO: 5101 - protein, 7 aa, Artificial Sequence
  Description of Artificial Sequence: Synthetic Light chain variable region CDR L2 amino acid sequence
WASTRES

SEQ ID NO: 5102 - DNA, 21 bp, Artificial Sequence
  Description of Artificial Sequence: Synthetic Light chain variable region CDR L2 nucleic acid sequence
tgggcatctacccgggaatcc

SEQ ID NO: 5103 - protein, 8 aa, Artificial Sequence
  Description of Artificial Sequence: Synthetic Light chain variable region CDR L3 amino acid sequence
KQSYSRRT

SEQ ID NO: 5104 - DNA, 24 bp, Artificial Sequence
  Description of Artificial Sequence: Synthetic Light chain variable region CDR L3 nucleic acid sequence
aagcaatcttattctcggagaact

SEQ ID NO: 5105 - DNA, 357 bp, Artificial Sequence; identical to SEQ ID NO: 4961
  Description of Artificial Sequence: Synthetic Heavy chain variable region nucleic acid sequence

SEQ ID NO: 5106 - protein, 119 aa, Artificial Sequence; identical to SEQ ID NO: 4962
  Description of Artificial Sequence: Synthetic Heavy chain variable region amino acid sequence

SEQ ID NO: 5107 - protein, 9 aa, Artificial Sequence
  Description of Artificial Sequence: Synthetic Heavy chain variable region CDR H1 amino acid sequence
FNIKDYYMH

SEQ ID NO: 5108 - DNA, 27 bp, Artificial Sequence
  Description of Artificial Sequence: Synthetic Heavy chain variable region CDR H1 nucleic acid sequence
ttcaacatcaaggactactatatgcac

SEQ ID NO: 5109 - protein, 17 aa, Artificial Sequence
  Description of Artificial Sequence: Synthetic Heavy chain variable region CDR H2 amino acid sequence
WIDLENGNTIYDPKFQG

SEQ ID NO: 5110 - DNA, 51 bp, Artificial Sequence; identical to SEQ ID NO: 3574
  Description of Artificial Sequence: Synthetic Heavy chain variable region CDR H2 nucleic acid sequence

SEQ ID NO: 5111 - protein, 12 aa, Artificial Sequence
  Description of Artificial Sequence: Synthetic Heavy chain variable region CDR H3 amino acid sequence
ARDGYGRYFYDV

SEQ ID NO: 5112 - DNA, 36 bp, Artificial Sequence; identical to SEQ ID NO: 4168
  Description of Artificial Sequence: Synthetic Heavy chain variable region CDR H3 nucleic acid sequence

SEQ ID NO: 5113 - DNA, 336 bp, Artificial Sequence; identical to SEQ ID NO: 4969
  Description of Artificial Sequence: Synthetic Light chain variable region nucleic acid sequence

SEQ ID NO: 5114 - protein, 112 aa, Artificial Sequence; identical to SEQ ID NO: 4970
  Description of Artificial Sequence: Synthetic Light chain variable region amino acid sequence

SEQ ID NO: 5115 - protein, 17 aa, Artificial Sequence
  Description of Artificial Sequence: Synthetic Light chain variable region CDR L1 amino acid sequence
KSSQSLLNSRTGKNYLA

SEQ ID NO: 5116 - DNA, 51 bp, Artificial Sequence; identical to SEQ ID NO: 3868
  Description of Artificial Sequence: Synthetic Light chain variable region CDR L1 nucleic acid sequence

SEQ ID NO: 5117 - protein, 7 aa, Artificial Sequence
  Description of Artificial Sequence: Synthetic Light chain variable region CDR L2 amino acid sequence
WASTRES

SEQ ID NO: 5118 - DNA, 21 bp, Artificial Sequence
  Description of Artificial Sequence: Synthetic Light chain variable region CDR L2 nucleic acid sequence
tgggcatctacccgggaatcc

SEQ ID NO: 5119 - protein, 8 aa, Artificial Sequence
  Description of Artificial Sequence: Synthetic Light chain variable region CDR L3 amino acid sequence
KQSYSRRT

SEQ ID NO: 5120 - DNA, 24 bp, Artificial Sequence
  Description of Artificial Sequence: Synthetic Light chain variable region CDR L3 nucleic acid sequence
aagcaatcttattctcggagaact

SEQ ID NO: 5121 - DNA, 357 bp, Artificial Sequence; identical to SEQ ID NO: 4961
  Description of Artificial Sequence: Synthetic Heavy chain variable region nucleic acid sequence

SEQ ID NO: 5122 - protein, 119 aa, Artificial Sequence; identical to SEQ ID NO: 4962
  Description of Artificial Sequence: Synthetic Heavy chain variable region amino acid sequence

SEQ ID NO: 5123 - protein, 9 aa, Artificial Sequence
  Description of Artificial Sequence: Synthetic Heavy chain variable region CDR H1 amino acid sequence
FNIKDYYMH

SEQ ID NO: 5124 - DNA, 27 bp, Artificial Sequence
  Description of Artificial Sequence: Synthetic Heavy chain variable region CDR H1 nucleic acid sequence
ttcaacatcaaggactactatatgcac

SEQ ID NO: 5125 - protein, 17 aa, Artificial Sequence
  Description of Artificial Sequence: Synthetic Heavy chain variable region CDR H2 amino acid sequence
WIDLENGNTIYDPKFQG

SEQ ID NO: 5126 - DNA, 51 bp, Artificial Sequence; identical to SEQ ID NO: 3574
  Description of Artificial Sequence: Synthetic Heavy chain variable region CDR H2 nucleic acid sequence

SEQ ID NO: 5127 - protein, 12 aa, Artificial Sequence
  Description of Artificial Sequence: Synthetic Heavy chain variable region CDR H3 amino acid sequence
ARDGYGRYFYDV

SEQ ID NO: 5128 - DNA, 36 bp, Artificial Sequence; identical to SEQ ID NO: 4168
  Description of Artificial Sequence: Synthetic Heavy chain variable region CDR H3 nucleic acid sequence

SEQ ID NO: 5129 - DNA, 336 bp, Artificial Sequence; identical to SEQ ID NO: 4969
  Description of Artificial Sequence: Synthetic Light chain variable region nucleic acid sequence

SEQ ID NO: 5130 - protein, 112 aa, Artificial Sequence; identical to SEQ ID NO: 4970
  Description of Artificial Sequence: Synthetic Light chain variable region amino acid sequence

SEQ ID NO: 5131 - protein, 17 aa, Artificial Sequence
  Description of Artificial Sequence: Synthetic Light chain variable region CDR L1 amino acid sequence
KSSQSLLNSRTGKNYLA

SEQ ID NO: 5132 - DNA, 51 bp, Artificial Sequence; identical to SEQ ID NO: 3868
  Description of Artificial Sequence: Synthetic Light chain variable region CDR L1 nucleic acid sequence

SEQ ID NO: 5133 - protein, 7 aa, Artificial Sequence
  Description of Artificial Sequence: Synthetic Light chain variable region CDR L2 amino acid sequence
WASTRES

SEQ ID NO: 5134 - DNA, 21 bp, Artificial Sequence
  Description of Artificial Sequence: Synthetic Light chain variable region CDR L2 nucleic acid sequence
tgggcatctacccgggaatcc

SEQ ID NO: 5135 - protein, 8 aa, Artificial Sequence
  Description of Artificial Sequence: Synthetic Light chain variable region CDR L3 amino acid sequence
KQSYSRRT

SEQ ID NO: 5136 - DNA, 24 bp, Artificial Sequence
  Description of Artificial Sequence: Synthetic Light chain variable region CDR L3 nucleic acid sequence
aagcaatcttattctcggagaact

SEQ ID NO: 5137 - DNA, 357 bp, Artificial Sequence; identical to SEQ ID NO: 4961
  Description of Artificial Sequence: Synthetic Heavy chain variable region nucleic acid sequence

SEQ ID NO: 5138 - protein, 119 aa, Artificial Sequence; identical to SEQ ID NO: 4962
  Description of Artificial Sequence: Synthetic Heavy chain variable region amino acid sequence

SEQ ID NO: 5139 - protein, 9 aa, Artificial Sequence
  Description of Artificial Sequence: Synthetic Heavy chain variable region CDR H1 amino acid sequence
FNIKDYYMH

SEQ ID NO: 5140 - DNA, 27 bp, Artificial Sequence
  Description of Artificial Sequence: Synthetic Heavy chain variable region CDR H1 nucleic acid sequence
ttcaacatcaaggactactatatgcac

SEQ ID NO: 5141 - protein, 17 aa, Artificial Sequence
  Description of Artificial Sequence: Synthetic Heavy chain variable region CDR H2 amino acid sequence
WIDLENGNTIYDPKFQG

SEQ ID NO: 5142 - DNA, 51 bp, Artificial Sequence; identical to SEQ ID NO: 3574
  Description of Artificial Sequence: Synthetic Heavy chain variable region CDR H2 nucleic acid sequence

SEQ ID NO: 5143 - protein, 12 aa, Artificial Sequence
  Description of Artificial Sequence: Synthetic Heavy chain variable region CDR H3 amino acid sequence
ARDGYGRYFYDV

SEQ ID NO: 5144 - DNA, 36 bp, Artificial Sequence; identical to SEQ ID NO: 4168
  Description of Artificial Sequence: Synthetic Heavy chain variable region CDR H3 nucleic acid sequence

SEQ ID NO: 5145 - DNA, 336 bp, Artificial Sequence; identical to SEQ ID NO: 4969
  Description of Artificial Sequence: Synthetic Light chain variable region nucleic acid sequence

SEQ ID NO: 5146 - protein, 112 aa, Artificial Sequence; identical to SEQ ID NO: 4970
  Description of Artificial Sequence: Synthetic Light chain variable region amino acid sequence

SEQ ID NO: 5147 - protein, 17 aa, Artificial Sequence
  Description of Artificial Sequence: Synthetic Light chain variable region CDR L1 amino acid sequence
KSSQSLLNSRTGKNYLA

SEQ ID NO: 5148 - DNA, 51 bp, Artificial Sequence; identical to SEQ ID NO: 3868
  Description of Artificial Sequence: Synthetic Light chain variable region CDR L1 nucleic acid sequence

SEQ ID NO: 5149 - protein, 7 aa, Artificial Sequence
  Description of Artificial Sequence: Synthetic Light chain variable region CDR L2 amino acid sequence
WASTRES

SEQ ID NO: 5150 - DNA, 21 bp, Artificial Sequence
  Description of Artificial Sequence: Synthetic Light chain variable region CDR L2 nucleic acid sequence
tgggcatctacccgggaatcc

SEQ ID NO: 5151 - protein, 8 aa, Artificial Sequence
  Description of Artificial Sequence: Synthetic Light chain variable region CDR L3 amino acid sequence
KQSYSRRT

SEQ ID NO: 5152 - DNA, 24 bp, Artificial Sequence
  Description of Artificial Sequence: Synthetic Light chain variable region CDR L3 nucleic acid sequence
aagcaatcttattctcggagaact

SEQ ID NO: 5153 - DNA, 357 bp, Artificial Sequence; identical to SEQ ID NO: 4961
  Description of Artificial Sequence: Synthetic Heavy chain variable region nucleic acid sequence

SEQ ID NO: 5154 - protein, 119 aa, Artificial Sequence; identical to SEQ ID NO: 4962
  Description of Artificial Sequence: Synthetic Heavy chain variable region amino acid sequence

SEQ ID NO: 5155 - protein, 9 aa, Artificial Sequence
  Description of Artificial Sequence: Synthetic Heavy chain variable region CDR H1 amino acid sequence
FNIKDYYMH

SEQ ID NO: 5156 - DNA, 27 bp, Artificial Sequence
  Description of Artificial Sequence: Synthetic Heavy chain variable region CDR H1 nucleic acid sequence
ttcaacatcaaggactactatatgcac

SEQ ID NO: 5157 - protein, 17 aa, Artificial Sequence
  Description of Artificial Sequence: Synthetic Heavy chain variable region CDR H2 amino acid sequence
WIDLENGNTIYDPKFQG

SEQ ID NO: 5158 - DNA, 51 bp, Artificial Sequence; identical to SEQ ID NO: 3574
  Description of Artificial Sequence: Synthetic Heavy chain variable region CDR H2 nucleic acid sequence

SEQ ID NO: 5159 - protein, 12 aa, Artificial Sequence
  Description of Artificial Sequence: Synthetic Heavy chain variable region CDR H3 amino acid sequence
ARDGYGRYFYDV

SEQ ID NO: 5160 - DNA, 36 bp, Artificial Sequence; identical to SEQ ID NO: 4168
  Description of Artificial Sequence: Synthetic Heavy chain variable region CDR H3 nucleic acid sequence

SEQ ID NO: 5161 - DNA, 336 bp, Artificial Sequence; identical to SEQ ID NO: 4969
  Description of Artificial Sequence: Synthetic Light chain variable region nucleic acid sequence

SEQ ID NO: 5162 - protein, 112 aa, Artificial Sequence; identical to SEQ ID NO: 4970
  Description of Artificial Sequence: Synthetic Light chain variable region amino acid sequence

SEQ ID NO: 5163 - protein, 17 aa, Artificial Sequence
  Description of Artificial Sequence: Synthetic Light chain variable region CDR L1 amino acid sequence
KSSQSLLNSRTGKNYLA

SEQ ID NO: 5164 - DNA, 51 bp, Artificial Sequence; identical to SEQ ID NO: 3868
  Description of Artificial Sequence: Synthetic Light chain variable region CDR L1 nucleic acid sequence

SEQ ID NO: 5165 - protein, 7 aa, Artificial Sequence
  Description of Artificial Sequence: Synthetic Light chain variable region CDR L2 amino acid sequence
WASTRES

SEQ ID NO: 5166 - DNA, 21 bp, Artificial Sequence
  Description of Artificial Sequence: Synthetic Light chain variable region CDR L2 nucleic acid sequence
tgggcatctacccgggaatcc

SEQ ID NO: 5167 - protein, 8 aa, Artificial Sequence
  Description of Artificial Sequence: Synthetic Light chain variable region CDR L3 amino acid sequence
KQSYSRRT

SEQ ID NO: 5168 - DNA, 24 bp, Artificial Sequence
  Description of Artificial Sequence: Synthetic Light chain variable region CDR L3 nucleic acid sequence
aagcaatcttattctcggagaact

SEQ ID NO: 5169 - DNA, 357 bp, Artificial Sequence
  Description of Artificial Sequence: Synthetic Heavy chain variable region nucleic acid sequence
caggtgcagctggtgcagtctggggctgaggtgaagaagcctggggcctcagtgaaggtctcctgcaaggcttctggattcaacatcaaggactactatatgcactgggtgcgacaggctcctggaggatgtcttgagtggatgggatggatcgaccttgaaaatggtaacacaatctatgacccgaagtttcagggcagggtcaccataaccagggacacgtccgccagcacagcctacatggagctgagcagcctgagatctgaagacacggcggtgtactactgcgcgagagatggatacgggagatatttttacgacgtgtggggccaaggaaccctggtcaccgtctcctca

SEQ ID NO: 5170 - protein, 119 aa, Artificial Sequence
  Description of Artificial Sequence: Synthetic Heavy chain variable region amino acid sequence
QVQLVQSGAEVKKPGASVKVSCKASGFNIKDYYMHWVRQAPGGCLEWMGWIDLENGNTIYDPKFQGRVTITRDTSASTAYMELSSLRSEDTAVYYCARDGYGRYFYDVWGQGTLVTVSS

SEQ ID NO: 5171 - protein, 9 aa, Artificial Sequence
  Description of Artificial Sequence: Synthetic Heavy chain variable region CDR H1 amino acid sequence
FNIKDYYMH

SEQ ID NO: 5172 - DNA, 27 bp, Artificial Sequence
  Description of Artificial Sequence: Synthetic Heavy chain variable region CDR H1 nucleic acid sequence
ttcaacatcaaggactactatatgcac

SEQ ID NO: 5173 - protein, 17 aa, Artificial Sequence
  Description of Artificial Sequence: Synthetic Heavy chain variable region CDR H2 amino acid sequence
WIDLENGNTIYDPKFQG

SEQ ID NO: 5174 - DNA, 51 bp, Artificial Sequence; identical to SEQ ID NO: 3574
  Description of Artificial Sequence: Synthetic Heavy chain variable region CDR H2 nucleic acid sequence

SEQ ID NO: 5175 - protein, 12 aa, Artificial Sequence
  Description of Artificial Sequence: Synthetic Heavy chain variable region CDR H3 amino acid sequence
ARDGYGRYFYDV

SEQ ID NO: 5176 - DNA, 36 bp, Artificial Sequence; identical to SEQ ID NO: 4168
  Description of Artificial Sequence: Synthetic Heavy chain variable region CDR H3 nucleic acid sequence

SEQ ID NO: 5177 - DNA, 336 bp, Artificial Sequence; identical to SEQ ID NO: 4969
  Description of Artificial Sequence: Synthetic Light chain variable region nucleic acid sequence

SEQ ID NO: 5178 - protein, 112 aa, Artificial Sequence; identical to SEQ ID NO: 4970
  Description of Artificial Sequence: Synthetic Light chain variable region amino acid sequence

SEQ ID NO: 5179 - protein, 17 aa, Artificial Sequence
  Description of Artificial Sequence: Synthetic Light chain variable region CDR L1 amino acid sequence
KSSQSLLNSRTGKNYLA

SEQ ID NO: 5180 - DNA, 51 bp, Artificial Sequence; identical to SEQ ID NO: 3868
  Description of Artificial Sequence: Synthetic Light chain variable region CDR L1 nucleic acid sequence

SEQ ID NO: 5181 - protein, 7 aa, Artificial Sequence
  Description of Artificial Sequence: Synthetic Light chain variable region CDR L2 amino acid sequence
WASTRES

SEQ ID NO: 5182 - DNA, 21 bp, Artificial Sequence
  Description of Artificial Sequence: Synthetic Light chain variable region CDR L2 nucleic acid sequence
tgggcatctacccgggaatcc

SEQ ID NO: 5183 - protein, 8 aa, Artificial Sequence
  Description of Artificial Sequence: Synthetic Light chain variable region CDR L3 amino acid sequence
KQSYSRRT

SEQ ID NO: 5184 - DNA, 24 bp, Artificial Sequence
  Description of Artificial Sequence: Synthetic Light chain variable region CDR L3 nucleic acid sequence
aagcaatcttattctcggagaact

SEQ ID NO: 5185 - DNA, 357 bp, Artificial Sequence; identical to SEQ ID NO: 4705
  Description of Artificial Sequence: Synthetic Heavy chain variable region nucleic acid sequence

SEQ ID NO: 5186 - protein, 119 aa, Artificial Sequence; identical to SEQ ID NO: 4706
  Description of Artificial Sequence: Synthetic Heavy chain variable region amino acid sequence

SEQ ID NO: 5187 - protein, 9 aa, Artificial Sequence
  Description of Artificial Sequence: Synthetic Heavy chain variable region CDR H1 amino acid sequence
FNIKDYYMH

SEQ ID NO: 5188 - DNA, 27 bp, Artificial Sequence
  Description of Artificial Sequence: Synthetic Heavy chain variable region CDR H1 nucleic acid sequence
ttcaacatcaaggactactatatgcac

SEQ ID NO: 5189 - protein, 17 aa, Artificial Sequence
  Description of Artificial Sequence: Synthetic Heavy chain variable region CDR H2 amino acid sequence
WIDLENANTIYDAKFQG

SEQ ID NO: 5190 - DNA, 51 bp, Artificial Sequence; identical to SEQ ID NO: 4662
  Description of Artificial Sequence: Synthetic Heavy chain variable region CDR H2 nucleic acid sequence

SEQ ID NO: 5191 - protein, 12 aa, Artificial Sequence
  Description of Artificial Sequence: Synthetic Heavy chain variable region CDR H3 amino acid sequence
ARDAYGRYFYDV

SEQ ID NO: 5192 - DNA, 36 bp, Artificial Sequence; identical to SEQ ID NO: 4568
  Description of Artificial Sequence: Synthetic Heavy chain variable region CDR H3 nucleic acid sequence

SEQ ID NO: 5193 - DNA, 336 bp, Artificial Sequence; identical to SEQ ID NO: 4537
  Description of Artificial Sequence: Synthetic Light chain variable region nucleic acid sequence

SEQ ID NO: 5194 - protein, 112 aa, Artificial Sequence; identical to SEQ ID NO: 4538
  Description of Artificial Sequence: Synthetic Light chain variable region amino acid sequence

SEQ ID NO: 5195 - protein, 17 aa, Artificial Sequence
  Description of Artificial Sequence: Synthetic Light chain variable region CDR L1 amino acid sequence
KSSQSLLNARTGKNYLA

SEQ ID NO: 5196 - DNA, 51 bp, Artificial Sequence; identical to SEQ ID NO: 4540
  Description of Artificial Sequence: Synthetic Light chain variable region CDR L1 nucleic acid sequence

SEQ ID NO: 5197 - protein, 7 aa, Artificial Sequence
  Description of Artificial Sequence: Synthetic Light chain variable region CDR L2 amino acid sequence
WASTRES

SEQ ID NO: 5198 - DNA, 21 bp, Artificial Sequence
  Description of Artificial Sequence: Synthetic Light chain variable region CDR L2 nucleic acid sequence
tgggcatctacccgggaatcc

SEQ ID NO: 5199 - protein, 8 aa, Artificial Sequence
  Description of Artificial Sequence: Synthetic Light chain variable region CDR L3 amino acid sequence
KQSYSRRT

SEQ ID NO: 5200 - DNA, 24 bp, Artificial Sequence
  Description of Artificial Sequence: Synthetic Light chain variable region CDR L3 nucleic acid sequence
aagcaatcttattctcggagaact

SEQ ID NO: 5201 - DNA, 357 bp, Artificial Sequence
  Description of Artificial Sequence: Synthetic Heavy chain variable region nucleic acid sequence
caggtgcagctggtgcagtctggggctgaggtgaagaagcctggggcctcagtgaaggtctcctgcaaggcttctggattcaacatcaaggactactatatgcactgggtgcgacaggctcctggacaaaggcttgagtggatgggatggatcgaccttgaaaatgctaacacaatctatgacgctaagtttcagggcagggtcaccataaccagggacacgtccgccagcacagcctacatggagctgagcagcctgagatctgaagacacggcggtgtactactgcggtagagatgcgtacgggagatatttttacgacgtgtggggccaaggaaccctggtcaccgtctcctca

SEQ ID NO: 5202 - protein, 119 aa, Artificial Sequence
  Description of Artificial Sequence: Synthetic Heavy chain variable region amino acid sequence
QVQLVQSGAEVKKPGASVKVSCKASGFNIKDYYMHWVRQAPGQRLEWMGWIDLENANTIYDAKFQGRVTITRDTSASTAYMELSSLRSEDTAVYYCGRDAYGRYFYDVWGQGTLVTVSS

SEQ ID NO: 5203 - protein, 9 aa, Artificial Sequence
  Description of Artificial Sequence: Synthetic Heavy chain variable region CDR H1 amino acid sequence
FNIKDYYMH

SEQ ID NO: 5204 - DNA, 27 bp, Artificial Sequence
  Description of Artificial Sequence: Synthetic Heavy chain variable region CDR H1 nucleic acid sequence
ttcaacatcaaggactactatatgcac

SEQ ID NO: 5205 - protein, 17 aa, Artificial Sequence
  Description of Artificial Sequence: Synthetic Heavy chain variable region CDR H2 amino acid sequence
WIDLENANTIYDAKFQG

SEQ ID NO: 5206 - DNA, 51 bp, Artificial Sequence; identical to SEQ ID NO: 4662
  Description of Artificial Sequence: Synthetic Heavy chain variable region CDR H2 nucleic acid sequence

SEQ ID NO: 5207 - protein, 12 aa, Artificial Sequence
  Description of Artificial Sequence: Synthetic Heavy chain variable region CDR H3 amino acid sequence
GRDAYGRYFYDV

SEQ ID NO: 5208 - DNA, 36 bp, Artificial Sequence
  Description of Artificial Sequence: Synthetic Heavy chain variable region CDR H3 nucleic acid sequence
ggtagagatgcgtacgggagatatttttacgacgtg

SEQ ID NO: 5209 - DNA, 336 bp, Artificial Sequence; identical to SEQ ID NO: 4537
  Description of Artificial Sequence: Synthetic Light chain variable region nucleic acid sequence

SEQ ID NO: 5210 - protein, 112 aa, Artificial Sequence; identical to SEQ ID NO: 4538
  Description of Artificial Sequence: Synthetic Light chain variable region amino acid sequence

SEQ ID NO: 5211 - protein, 17 aa, Artificial Sequence
  Description of Artificial Sequence: Synthetic Light chain variable region CDR L1 amino acid sequence
KSSQSLLNARTGKNYLA

SEQ ID NO: 5212 - DNA, 51 bp, Artificial Sequence; identical to SEQ ID NO: 4540
  Description of Artificial Sequence: Synthetic Light chain variable region CDR L1 nucleic acid sequence

SEQ ID NO: 5213 - protein, 7 aa, Artificial Sequence
  Description of Artificial Sequence: Synthetic Light chain variable region CDR L2 amino acid sequence
WASTRES

SEQ ID NO: 5214 - DNA, 21 bp, Artificial Sequence
  Description of Artificial Sequence: Synthetic Light chain variable region CDR L2 nucleic acid sequence
tgggcatctacccgggaatcc

SEQ ID NO: 5215 - protein, 8 aa, Artificial Sequence
  Description of Artificial Sequence: Synthetic Light chain variable region CDR L3 amino acid sequence
KQSYSRRT

SEQ ID NO: 5216 - DNA, 24 bp, Artificial Sequence
  Description of Artificial Sequence: Synthetic Light chain variable region CDR L3 nucleic acid sequence
aagcaatcttattctcggagaact

SEQ ID NO: 5217 - DNA, 357 bp, Artificial Sequence
  Description of Artificial Sequence: Synthetic Heavy chain variable region nucleic acid sequence
caggtgcagctggtgcagtctggggctgaggtgaagaagcctggggcctcagtgaaggtctcctgcaaggcttctggattcaacatcaaggactactatatgcactgggtgcgacaggctcctggacaaaggcttgagtggatgggatggatcgaccttgaagagggcaacacaatctatgacgctaagtttcagggcagggtcaccataaccagggacacgtccgccagcacagcctacatggagctgagcagcctgagatctgaagacacggcggtgtactactgcgcgagagatgcttacgggagatatttttacgacgtgtggggccaaggaaccctggtcaccgtctcctca

SEQ ID NO: 5218 - protein, 119 aa, Artificial Sequence
  Description of Artificial Sequence: Synthetic Heavy chain variable region amino acid sequence
QVQLVQSGAEVKKPGASVKVSCKASGFNIKDYYMHWVRQAPGQRLEWMGWIDLEEGNTIYDAKFQGRVTITRDTSASTAYMELSSLRSEDTAVYYCARDAYGRYFYDVWGQGTLVTVSS

SEQ ID NO: 5219 - protein, 9 aa, Artificial Sequence
  Description of Artificial Sequence: Synthetic Heavy chain variable region CDR H1 amino acid sequence
FNIKDYYMH

SEQ ID NO: 5220 - DNA, 27 bp, Artificial Sequence
  Description of Artificial Sequence: Synthetic Heavy chain variable region CDR H1 nucleic acid sequence
ttcaacatcaaggactactatatgcac

SEQ ID NO: 5221 - protein, 17 aa, Artificial Sequence
  Description of Artificial Sequence: Synthetic Heavy chain variable region CDR H2 amino acid sequence
WIDLEEGNTIYDAKFQG

SEQ ID NO: 5222 - DNA, 51 bp, Artificial Sequence
  Description of Artificial Sequence: Synthetic Heavy chain variable region CDR H2 nucleic acid sequence
tggatcgaccttgaagagggcaacacaatctatgacgctaagtttcagggc

SEQ ID NO: 5223 - protein, 12 aa, Artificial Sequence
  Description of Artificial Sequence: Synthetic Heavy chain variable region CDR H3 amino acid sequence
ARDAYGRYFYDV

SEQ ID NO: 5224 - DNA, 36 bp, Artificial Sequence; identical to SEQ ID NO: 4568
  Description of Artificial Sequence: Synthetic Heavy chain variable region CDR H3 nucleic acid sequence

SEQ ID NO: 5225 - DNA, 336 bp, Artificial Sequence; identical to SEQ ID NO: 4537
  Description of Artificial Sequence: Synthetic Light chain variable region nucleic acid sequence

SEQ ID NO: 5226 - protein, 112 aa, Artificial Sequence; identical to SEQ ID NO: 4538
  Description of Artificial Sequence: Synthetic Light chain variable region amino acid sequence

SEQ ID NO: 5227 - protein, 17 aa, Artificial Sequence
  Description of Artificial Sequence: Synthetic Light chain variable region CDR L1 amino acid sequence
KSSQSLLNARTGKNYLA

SEQ ID NO: 5228 - DNA, 51 bp, Artificial Sequence; identical to SEQ ID NO: 4540
  Description of Artificial Sequence: Synthetic Light chain variable region CDR L1 nucleic acid sequence

SEQ ID NO: 5229 - protein, 7 aa, Artificial Sequence
  Description of Artificial Sequence: Synthetic Light chain variable region CDR L2 amino acid sequence
WASTRES

SEQ ID NO: 5230 - DNA, 21 bp, Artificial Sequence
  Description of Artificial Sequence: Synthetic Light chain variable region CDR L2 nucleic acid sequence
tgggcatctacccgggaatcc

SEQ ID NO: 5231 - protein, 8 aa, Artificial Sequence
  Description of Artificial Sequence: Synthetic Light chain variable region CDR L3 amino acid sequence
KQSYSRRT

SEQ ID NO: 5232 - DNA, 24 bp, Artificial Sequence
  Description of Artificial Sequence: Synthetic Light chain variable region CDR L3 nucleic acid sequence
aagcaatcttattctcggagaact

SEQ ID NO: 5233 - DNA, 357 bp, Artificial Sequence
  Description of Artificial Sequence: Synthetic Heavy chain variable region nucleic acid sequence
caggtgcagctggtgcagtctggggctgaggtgaagaagcctggggcctcagtgaaggtctcctgcaaggcttctggattcaacatcaaggactactatatgcactgggtgcgacaggctcctggacaaaggcttgagtggatgggatggatcgaccttgaagagggcaacacaatctatgacgctaagtttcagggcagggtcaccataaccagggacacgtccgccagcacagcctacatggagctgagcagcctgagatctgaagacacggcggtgtactactgcggtagagatgcgtacgggagatatttttacgacgtgtggggccaaggaaccctggtcaccgtctcctca

SEQ ID NO: 5234 - protein, 119 aa, Artificial Sequence
  Description of Artificial Sequence: Synthetic Heavy chain variable region amino acid sequence
QVQLVQSGAEVKKPGASVKVSCKASGFNIKDYYMHWVRQAPGQRLEWMGWIDLEEGNTIYDAKFQGRVTITRDTSASTAYMELSSLRSEDTAVYYCGRDAYGRYFYDVWGQGTLVTVSS

SEQ ID NO: 5235 - protein, 9 aa, Artificial Sequence
  Description of Artificial Sequence: Synthetic Heavy chain variable region CDR H1 amino acid sequence
FNIKDYYMH

SEQ ID NO: 5236 - DNA, 27 bp, Artificial Sequence
  Description of Artificial Sequence: Synthetic Heavy chain variable region CDR H1 nucleic acid sequence
ttcaacatcaaggactactatatgcac

SEQ ID NO: 5237 - protein, 17 aa, Artificial Sequence
  Description of Artificial Sequence: Synthetic Heavy chain variable region CDR H2 amino acid sequence
WIDLEEGNTIYDAKFQG

SEQ ID NO: 5238 - DNA, 51 bp, Artificial Sequence; identical to SEQ ID NO: 5222
  Description of Artificial Sequence: Synthetic Heavy chain variable region CDR H2 nucleic acid sequence

SEQ ID NO: 5239 - protein, 12 aa, Artificial Sequence
  Description of Artificial Sequence: Synthetic Heavy chain variable region CDR H3 amino acid sequence
GRDAYGRYFYDV

SEQ ID NO: 5240 - DNA, 36 bp, Artificial Sequence; identical to SEQ ID NO: 5208
  Description of Artificial Sequence: Synthetic Heavy chain variable region CDR H3 nucleic acid sequence

SEQ ID NO: 5241 - DNA, 336 bp, Artificial Sequence; identical to SEQ ID NO: 4537
  Description of Artificial Sequence: Synthetic Light chain variable region nucleic acid sequence

SEQ ID NO: 5242 - protein, 112 aa, Artificial Sequence; identical to SEQ ID NO: 4538
  Description of Artificial Sequence: Synthetic Light chain variable region amino acid sequence

SEQ ID NO: 5243 - protein, 17 aa, Artificial Sequence
  Description of Artificial Sequence: Synthetic Light chain variable region CDR L1 amino acid sequence
KSSQSLLNARTGKNYLA

SEQ ID NO: 5244 - DNA, 51 bp, Artificial Sequence; identical to SEQ ID NO: 4540
  Description of Artificial Sequence: Synthetic Light chain variable region CDR L1 nucleic acid sequence

SEQ ID NO: 5245 - protein, 7 aa, Artificial Sequence
  Description of Artificial Sequence: Synthetic Light chain variable region CDR L2 amino acid sequence
WASTRES

SEQ ID NO: 5246 - DNA, 21 bp, Artificial Sequence
  Description of Artificial Sequence: Synthetic Light chain variable region CDR L2 nucleic acid sequence
tgggcatctacccgggaatcc

SEQ ID NO: 5247 - protein, 8 aa, Artificial Sequence
  Description of Artificial Sequence: Synthetic Light chain variable region CDR L3 amino acid sequence
KQSYSRRT

SEQ ID NO: 5248 - DNA, 24 bp, Artificial Sequence
  Description of Artificial Sequence: Synthetic Light chain variable region CDR L3 nucleic acid sequence
aagcaatcttattctcggagaact

SEQ ID NO: 5249 - DNA, 357 bp, Artificial Sequence
  Description of Artificial Sequence: Synthetic Heavy chain variable region nucleic acid sequence
caggtgcagctggtgcagtctggggctgaggtgaagaagcctggggcctcagtgaaggtctcctgcaaggcttctggattcaacatcaaggactactatatgcactgggtgcgacaggctcctggacaaaggcttgagtggatgggatggatcgaccttgaaaatgctaacacaatctatgacgctaagtttcagggcagggtcaccataaccagggacacgtccgccagcacagcctacatggagctgagcagcctgagatctgaagacacggcggtgtactactgcgcgagagatcgttacggggcttatttttacgacgtgtggggccaaggaaccctggtcaccgtctcctca

SEQ ID NO: 5250 - protein, 119 aa, Artificial Sequence
  Description of Artificial Sequence: Synthetic Heavy chain variable region amino acid sequence
QVQLVQSGAEVKKPGASVKVSCKASGFNIKDYYMHWVRQAPGQRLEWMGWIDLENANTIYDAKFQGRVTITRDTSASTAYMELSSLRSEDTAVYYCARDRYGAYFYDVWGQGTLVTVSS

SEQ ID NO: 5251 - protein, 9 aa, Artificial Sequence
  Description of Artificial Sequence: Synthetic Heavy chain variable region CDR H1 amino acid sequence
FNIKDYYMH

SEQ ID NO: 5252 - DNA, 27 bp, Artificial Sequence
  Description of Artificial Sequence: Synthetic Heavy chain variable region CDR H1 nucleic acid sequence
ttcaacatcaaggactactatatgcac

SEQ ID NO: 5253 - protein, 17 aa, Artificial Sequence
  Description of Artificial Sequence: Synthetic Heavy chain variable region CDR H2 amino acid sequence
WIDLENANTIYDAKFQG

SEQ ID NO: 5254 - DNA, 51 bp, Artificial Sequence; identical to SEQ ID NO: 4662
  Description of Artificial Sequence: Synthetic Heavy chain variable region CDR H2 nucleic acid sequence

SEQ ID NO: 5255 - protein, 12 aa, Artificial Sequence
  Description of Artificial Sequence: Synthetic Heavy chain variable region CDR H3 amino acid sequence
ARDRYGAYFYDV

SEQ ID NO: 5256 - DNA, 36 bp, Artificial Sequence
  Description of Artificial Sequence: Synthetic Heavy chain variable region CDR H3 nucleic acid sequence
gcgagagatcgttacggggcttatttttacgacgtg

SEQ ID NO: 5257 - DNA, 336 bp, Artificial Sequence; identical to SEQ ID NO: 4537
  Description of Artificial Sequence: Synthetic Light chain variable region nucleic acid sequence

SEQ ID NO: 5258 - protein, 112 aa, Artificial Sequence; identical to SEQ ID NO: 4538
  Description of Artificial Sequence: Synthetic Light chain variable region amino acid sequence

SEQ ID NO: 5259 - protein, 17 aa, Artificial Sequence
  Description of Artificial Sequence: Synthetic Light chain variable region CDR L1 amino acid sequence
KSSQSLLNARTGKNYLA

SEQ ID NO: 5260 - DNA, 51 bp, Artificial Sequence; identical to SEQ ID NO: 4540
  Description of Artificial Sequence: Synthetic Light chain variable region CDR L1 nucleic acid sequence

SEQ ID NO: 5261 - protein, 7 aa, Artificial Sequence
  Description of Artificial Sequence: Synthetic Light chain variable region CDR L2 amino acid sequence
WASTRES

SEQ ID NO: 5262 - DNA, 21 bp, Artificial Sequence
  Description of Artificial Sequence: Synthetic Light chain variable region CDR L2 nucleic acid sequence
tgggcatctacccgggaatcc

SEQ ID NO: 5263 - protein, 8 aa, Artificial Sequence
  Description of Artificial Sequence: Synthetic Light chain variable region CDR L3 amino acid sequence
KQSYSRRT

SEQ ID NO: 5264 - DNA, 24 bp, Artificial Sequence
  Description of Artificial Sequence: Synthetic Light chain variable region CDR L3 nucleic acid sequence
aagcaatcttattctcggagaact

SEQ ID NO: 5265 - DNA, 357 bp, Artificial Sequence
  Description of Artificial Sequence: Synthetic Heavy chain variable region nucleic acid sequence
caggtgcagctggtgcagtctggggctgaggtgaagaagcctggggcctcagtgaaggtctcctgcaaggcttctggattcaacatcaaggactactatatgcactgggtgcgacaggctcctggacaaaggcttgagtggatgggatggatcgaccttgaaaatgctaacacaatctatgacgctaagtttcagggcagggtcaccataaccagggacacgtccgccagcacagcctacatggagctgagcagcctgagatctgaagacacggcggtgtactactgcgcgagagatgtgttggggagatatttttacgacgtgtggggccaaggaaccctggtcaccgtctcctca

SEQ ID NO: 5266 - protein, 119 aa, Artificial Sequence
  Description of Artificial Sequence: Synthetic Heavy chain variable region amino acid sequence
QVQLVQSGAEVKKPGASVKVSCKASGFNIKDYYMHWVRQAPGQRLEWMGWIDLENANTIYDAKFQGRVTITRDTSASTAYMELSSLRSEDTAVYYCARDVLGRYFYDVWGQGTLVTVSS

SEQ ID NO: 5267 - protein, 9 aa, Artificial Sequence
  Description of Artificial Sequence: Synthetic Heavy chain variable region CDR H1 amino acid sequence
FNIKDYYMH

SEQ ID NO: 5268 - DNA, 27 bp, Artificial Sequence
  Description of Artificial Sequence: Synthetic Heavy chain variable region CDR H1 nucleic acid sequence
ttcaacatcaaggactactatatgcac

SEQ ID NO: 5269 - protein, 17 aa, Artificial Sequence
  Description of Artificial Sequence: Synthetic Heavy chain variable region CDR H2 amino acid sequence
WIDLENANTIYDAKFQG

SEQ ID NO: 5270 - DNA, 51 bp, Artificial Sequence; identical to SEQ ID NO: 4662
  Description of Artificial Sequence: Synthetic Heavy chain variable region CDR H2 nucleic acid sequence

SEQ ID NO: 5271 - protein, 12 aa, Artificial Sequence
  Description of Artificial Sequence: Synthetic Heavy chain variable region CDR H3 amino acid sequence
ARDVLGRYFYDV

SEQ ID NO: 5272 - DNA, 36 bp, Artificial Sequence
  Description of Artificial Sequence: Synthetic Heavy chain variable region CDR H3 nucleic acid sequence
gcgagagatgtgttggggagatatttttacgacgtg

SEQ ID NO: 5273 - DNA, 336 bp, Artificial Sequence; identical to SEQ ID NO: 4537
  Description of Artificial Sequence: Synthetic Light chain variable region nucleic acid sequence

SEQ ID NO: 5274 - protein, 112 aa, Artificial Sequence; identical to SEQ ID NO: 4538
  Description of Artificial Sequence: Synthetic Light chain variable region amino acid sequence

SEQ ID NO: 5275 - protein, 17 aa, Artificial Sequence
  Description of Artificial Sequence: Synthetic Light chain variable region CDR L1 amino acid sequence
KSSQSLLNARTGKNYLA

SEQ ID NO: 5276 - DNA, 51 bp, Artificial Sequence; identical to SEQ ID NO: 4540
  Description of Artificial Sequence: Synthetic Light chain variable region CDR L1 nucleic acid sequence

SEQ ID NO: 5277 - protein, 7 aa, Artificial Sequence
  Description of Artificial Sequence: Synthetic Light chain variable region CDR L2 amino acid sequence
WASTRES

SEQ ID NO: 5278 - DNA, 21 bp, Artificial Sequence
  Description of Artificial Sequence: Synthetic Light chain variable region CDR L2 nucleic acid sequence
tgggcatctacccgggaatcc

SEQ ID NO: 5279 - protein, 8 aa, Artificial Sequence
  Description of Artificial Sequence: Synthetic Light chain variable region CDR L3 amino acid sequence
KQSYSRRT

SEQ ID NO: 5280 - DNA, 24 bp, Artificial Sequence
  Description of Artificial Sequence: Synthetic Light chain variable region CDR L3 nucleic acid sequence
aagcaatcttattctcggagaact

SEQ ID NO: 5281 - DNA, 357 bp, Artificial Sequence
  Description of Artificial Sequence: Synthetic Heavy chain variable region nucleic acid sequence
caggtgcagctggtgcagtctggggctgaggtgaagaagcctggggcctcagtgaaggtctcctgcaaggcttctggattcaacatcaaggactactatatgcactgggtgcgacaggctcctggacaaaggcttgagtggatgggatggatcgaccttgaaaatgctaacacaatctatgacgctaagtttcagggcagggtcaccataaccagggacacgtccgccagcacagcctacatggagctgagcagcctgagatctgaagacacggcggtgtactactgcgcgagagatcagtacgggagatatttttacgacgtgtggggccaaggaaccctggtcaccgtctcctca

SEQ ID NO: 5282 - protein, 119 aa, Artificial Sequence
  Description of Artificial Sequence: Synthetic Heavy chain variable region amino acid sequence
QVQLVQSGAEVKKPGASVKVSCKASGFNIKDYYMHWVRQAPGQRLEWMGWIDLENANTIYDAKFQGRVTITRDTSASTAYMELSSLRSEDTAVYYCARDQYGRYFYDVWGQGTLVTVSS

SEQ ID NO: 5283 - protein, 9 aa, Artificial Sequence
  Description of Artificial Sequence: Synthetic Heavy chain variable region CDR H1 amino acid sequence
FNIKDYYMH

SEQ ID NO: 5284 - DNA, 27 bp, Artificial Sequence
  Description of Artificial Sequence: Synthetic Heavy chain variable region CDR H1 nucleic acid sequence
ttcaacatcaaggactactatatgcac

SEQ ID NO: 5285 - protein, 17 aa, Artificial Sequence
  Description of Artificial Sequence: Synthetic Heavy chain variable region CDR H2 amino acid sequence
WIDLENANTIYDAKFQG

SEQ ID NO: 5286 - DNA, 51 bp, Artificial Sequence; identical to SEQ ID NO: 4662
  Description of Artificial Sequence: Synthetic Heavy chain variable region CDR H2 nucleic acid sequence

SEQ ID NO: 5287 - protein, 12 aa, Artificial Sequence
  Description of Artificial Sequence: Synthetic Heavy chain variable region CDR H3 amino acid sequence
ARDQYGRYFYDV

SEQ ID NO: 5288 - DNA, 36 bp, Artificial Sequence
  Description of Artificial Sequence: Synthetic Heavy chain variable region CDR H3 nucleic acid sequence
gcgagagatcagtacgggagatatttttacgacgtg

SEQ ID NO: 5289 - DNA, 336 bp, Artificial Sequence; identical to SEQ ID NO: 4537
  Description of Artificial Sequence: Synthetic Light chain variable region nucleic acid sequence

SEQ ID NO: 5290 - protein, 112 aa, Artificial Sequence; identical to SEQ ID NO: 4538
  Description of Artificial Sequence: Synthetic Light chain variable region amino acid sequence

SEQ ID NO: 5291 - protein, 17 aa, Artificial Sequence
  Description of Artificial Sequence: Synthetic Light chain variable region CDR L1 amino acid sequence
KSSQSLLNARTGKNYLA

SEQ ID NO: 5292 - DNA, 51 bp, Artificial Sequence; identical to SEQ ID NO: 4540
  Description of Artificial Sequence: Synthetic Light chain variable region CDR L1 nucleic acid sequence

SEQ ID NO: 5293 - protein, 7 aa, Artificial Sequence
  Description of Artificial Sequence: Synthetic Light chain variable region CDR L2 amino acid sequence
WASTRES

SEQ ID NO: 5294 - DNA, 21 bp, Artificial Sequence
  Description of Artificial Sequence: Synthetic Light chain variable region CDR L2 nucleic acid sequence
tgggcatctacccgggaatcc

SEQ ID NO: 5295 - protein, 8 aa, Artificial Sequence
  Description of Artificial Sequence: Synthetic Light chain variable region CDR L3 amino acid sequence
KQSYSRRT

SEQ ID NO: 5296 - DNA, 24 bp, Artificial Sequence
  Description of Artificial Sequence: Synthetic Light chain variable region CDR L3 nucleic acid sequence
aagcaatcttattctcggagaact

SEQ ID NO: 5297 - DNA, 357 bp, Artificial Sequence
  Description of Artificial Sequence: Synthetic Heavy chain variable region nucleic acid sequence
caggtgcagctggtgcagtctggggctgaggtgaagaagcctggggcctcagtgaaggtctcctgcaaggcttctggattcaacatcaaggactactatatgcactgggtgcgacaggctcctggacaaaggcttgagtggatgggatggatcgaccttgaagagggcaacacaatctatgacgctaagtttcagggcagggtcaccataaccagggacacgtccgccagcacagcctacatggagctgagcagcctgagatctgaagacacggcggtgtactactgcgcgagagatgtgttggggagatatttttacgacgtgtggggccaaggaaccctggtcaccgtctcctca

SEQ ID NO: 5298 - protein, 119 aa, Artificial Sequence
  Description of Artificial Sequence: Synthetic Heavy chain variable region amino acid sequence
QVQLVQSGAEVKKPGASVKVSCKASGFNIKDYYMHWVRQAPGQRLEWMGWIDLEEGNTIYDAKFQGRVTITRDTSASTAYMELSSLRSEDTAVYYCARDVLGRYFYDVWGQGTLVTVSS

SEQ ID NO: 5299 - protein, 9 aa, Artificial Sequence
  Description of Artificial Sequence: Synthetic Heavy chain variable region CDR H1 amino acid sequence
FNIKDYYMH

SEQ ID NO: 5300 - DNA, 27 bp, Artificial Sequence
  Description of Artificial Sequence: Synthetic Heavy chain variable region CDR H1 nucleic acid sequence
ttcaacatcaaggactactatatgcac

SEQ ID NO: 5301 - protein, 17 aa, Artificial Sequence
  Description of Artificial Sequence: Synthetic Heavy chain variable region CDR H2 amino acid sequence
WIDLEEGNTIYDAKFQG

SEQ ID NO: 5302 - DNA, 51 bp, Artificial Sequence; identical to SEQ ID NO: 5222
  Description of Artificial Sequence: Synthetic Heavy chain variable region CDR H2 nucleic acid sequence

SEQ ID NO: 5303 - protein, 12 aa, Artificial Sequence
  Description of Artificial Sequence: Synthetic Heavy chain variable region CDR H3 amino acid sequence
ARDVLGRYFYDV

SEQ ID NO: 5304 - DNA, 36 bp, Artificial Sequence; identical to SEQ ID NO: 5272
  Description of Artificial Sequence: Synthetic Heavy chain variable region CDR H3 nucleic acid sequence

SEQ ID NO: 5305 - DNA, 336 bp, Artificial Sequence; identical to SEQ ID NO: 4537
  Description of Artificial Sequence: Synthetic Light chain variable region nucleic acid sequence

SEQ ID NO: 5306 - protein, 112 aa, Artificial Sequence; identical to SEQ ID NO: 4538
  Description of Artificial Sequence: Synthetic Light chain variable region amino acid sequence

SEQ ID NO: 5307 - protein, 17 aa, Artificial Sequence
  Description of Artificial Sequence: Synthetic Light chain variable region CDR L1 amino acid sequence
KSSQSLLNARTGKNYLA

SEQ ID NO: 5308 - DNA, 51 bp, Artificial Sequence; identical to SEQ ID NO: 4540
  Description of Artificial Sequence: Synthetic Light chain variable region CDR L1 nucleic acid sequence

SEQ ID NO: 5309 - protein, 7 aa, Artificial Sequence
  Description of Artificial Sequence: Synthetic Light chain variable region CDR L2 amino acid sequence
WASTRES

SEQ ID NO: 5310 - DNA, 21 bp, Artificial Sequence
  Description of Artificial Sequence: Synthetic Light chain variable region CDR L2 nucleic acid sequence
tgggcatctacccgggaatcc

SEQ ID NO: 5311 - protein, 8 aa, Artificial Sequence
  Description of Artificial Sequence: Synthetic Light chain variable region CDR L3 amino acid sequence
KQSYSRRT

SEQ ID NO: 5312 - DNA, 24 bp, Artificial Sequence
  Description of Artificial Sequence: Synthetic Light chain variable region CDR L3 nucleic acid sequence
aagcaatcttattctcggagaact

SEQ ID NO: 5313 - DNA, 357 bp, Artificial Sequence
  Description of Artificial Sequence: Synthetic Heavy chain variable region nucleic acid sequence
caggtgcagctggtgcagtctggggctgaggtgaagaagcctggggcctcagtgaaggtctcctgcaaggcttctggattcaacatcaaggactactatatgcactgggtgcgacaggctcctggacaaaggcttgagtggatgggatggatcgaccttgaaaatgctaacacaatctatgacgctaagtttcagggcagggtcaccataaccagggacacgtccgccagcacagcctacatggagctgagcagcctgagatctgaagacacggcggtgtactactgcgcgagagatgtgtacgggagatatttttacgacctttggggccaaggaaccctggtcaccgtctcctca

SEQ ID NO: 5314 - protein, 119 aa, Artificial Sequence
  Description of Artificial Sequence: Synthetic Heavy chain variable region amino acid sequence
QVQLVQSGAEVKKPGASVKVSCKASGFNIKDYYMHWVRQAPGQRLEWMGWIDLENANTIYDAKFQGRVTITRDTSASTAYMELSSLRSEDTAVYYCARDVYGRYFYDLWGQGTLVTVSS

SEQ ID NO: 5315 - protein, 9 aa, Artificial Sequence
  Description of Artificial Sequence: Synthetic Heavy chain variable region CDR H1 amino acid sequence
FNIKDYYMH

SEQ ID NO: 5316 - DNA, 27 bp, Artificial Sequence
  Description of Artificial Sequence: Synthetic Heavy chain variable region CDR H1 nucleic acid sequence
ttcaacatcaaggactactatatgcac

SEQ ID NO: 5317 - protein, 17 aa, Artificial Sequence
  Description of Artificial Sequence: Synthetic Heavy chain variable region CDR H2 amino acid sequence
WIDLENANTIYDAKFQG

SEQ ID NO: 5318 - DNA, 51 bp, Artificial Sequence; identical to SEQ ID NO: 4662
  Description of Artificial Sequence: Synthetic Heavy chain variable region CDR H2 nucleic acid sequence

SEQ ID NO: 5319 - protein, 12 aa, Artificial Sequence
  Description of Artificial Sequence: Synthetic Heavy chain variable region CDR H3 amino acid sequence
ARDVYGRYFYDL

SEQ ID NO: 5320 - DNA, 36 bp, Artificial Sequence
  Description of Artificial Sequence: Synthetic Heavy chain variable region CDR H3 nucleic acid sequence
gcgagagatgtgtacgggagatatttttacgacctt

SEQ ID NO: 5321 - DNA, 336 bp, Artificial Sequence; identical to SEQ ID NO: 4537
  Description of Artificial Sequence: Synthetic Light chain variable region nucleic acid sequence

SEQ ID NO: 5322 - protein, 112 aa, Artificial Sequence; identical to SEQ ID NO: 4538
  Description of Artificial Sequence: Synthetic Light chain variable region amino acid sequence

SEQ ID NO: 5323 - protein, 17 aa, Artificial Sequence
  Description of Artificial Sequence: Synthetic Light chain variable region CDR L1 amino acid sequence
KSSQSLLNARTGKNYLA

SEQ ID NO: 5324 - DNA, 51 bp, Artificial Sequence; identical to SEQ ID NO: 4540
  Description of Artificial Sequence: Synthetic Light chain variable region CDR L1 nucleic acid sequence

SEQ ID NO: 5325 - protein, 7 aa, Artificial Sequence
  Description of Artificial Sequence: Synthetic Light chain variable region CDR L2 amino acid sequence
WASTRES

SEQ ID NO: 5326 - DNA, 21 bp, Artificial Sequence
  Description of Artificial Sequence: Synthetic Light chain variable region CDR L2 nucleic acid sequence
tgggcatctacccgggaatcc

SEQ ID NO: 5327 - protein, 8 aa, Artificial Sequence
  Description of Artificial Sequence: Synthetic Light chain variable region CDR L3 amino acid sequence
KQSYSRRT

SEQ ID NO: 5328 - DNA, 24 bp, Artificial Sequence
  Description of Artificial Sequence: Synthetic Light chain variable region CDR L3 nucleic acid sequence
aagcaatcttattctcggagaact

SEQ ID NO: 5329 - DNA, 357 bp, Artificial Sequence
  Description of Artificial Sequence: Synthetic Heavy chain variable region nucleic acid sequence
caggtgcagctggtgcagtctggggctgaggtgaagaagcctggggcctcagtgaaggtctcctgcaaggcttctggattcaacatcaaggactactatatgcactgggtgcgacaggctcctggacaaaggcttgagtggatgggatggatcgaccttgaaaatgctaacacaatctatgacgctaagtttcagggcagggtcaccataaccagggacacgtccgccagcacagcctacatggagctgagcagcctgagatctgaagacacggcggtgtactactgcgcgagagatgcgtacggggggtatttttacgacgtgtggggccaaggaaccctggtcaccgtctcctca

SEQ ID NO: 5330 - protein, 119 aa, Artificial Sequence
  Description of Artificial Sequence: Synthetic Heavy chain variable region amino acid sequence
QVQLVQSGAEVKKPGASVKVSCKASGFNIKDYYMHWVRQAPGQRLEWMGWIDLENANTIYDAKFQGRVTITRDTSASTAYMELSSLRSEDTAVYYCARDAYGGYFYDVWGQGTLVTVSS

SEQ ID NO: 5331 - protein, 9 aa, Artificial Sequence
  Description of Artificial Sequence: Synthetic Heavy chain variable region CDR H1 amino acid sequence
FNIKDYYMH

SEQ ID NO: 5332 - DNA, 27 bp, Artificial Sequence
  Description of Artificial Sequence: Synthetic Heavy chain variable region CDR H1 nucleic acid sequence
ttcaacatcaaggactactatatgcac

SEQ ID NO: 5333 - protein, 17 aa, Artificial Sequence
  Description of Artificial Sequence: Synthetic Heavy chain variable region CDR H2 amino acid sequence
WIDLENANTIYDAKFQG

SEQ ID NO: 5334 - DNA, 51 bp, Artificial Sequence; identical to SEQ ID NO: 4662
  Description of Artificial Sequence: Synthetic Heavy chain variable region CDR H2 nucleic acid sequence

SEQ ID NO: 5335 - protein, 12 aa, Artificial Sequence
  Description of Artificial Sequence: Synthetic Heavy chain variable region CDR H3 amino acid sequence
ARDAYGGYFYDV

SEQ ID NO: 5336 - DNA, 36 bp, Artificial Sequence
  Description of Artificial Sequence: Synthetic Heavy chain variable region CDR H3 nucleic acid sequence
gcgagagatgcgtacggggggtatttttacgacgtg

SEQ ID NO: 5337 - DNA, 336 bp, Artificial Sequence; identical to SEQ ID NO: 4537
  Description of Artificial Sequence: Synthetic Light chain variable region nucleic acid sequence

SEQ ID NO: 5338 - protein, 112 aa, Artificial Sequence; identical to SEQ ID NO: 4538
  Description of Artificial Sequence: Synthetic Light chain variable region amino acid sequence

SEQ ID NO: 5339 - protein, 17 aa, Artificial Sequence
  Description of Artificial Sequence: Synthetic Light chain variable region CDR L1 amino acid sequence
KSSQSLLNARTGKNYLA

SEQ ID NO: 5340 - DNA, 51 bp, Artificial Sequence; identical to SEQ ID NO: 4540
  Description of Artificial Sequence: Synthetic Light chain variable region CDR L1 nucleic acid sequence

SEQ ID NO: 5341 - protein, 7 aa, Artificial Sequence
  Description of Artificial Sequence: Synthetic Light chain variable region CDR L2 amino acid sequence
WASTRES

SEQ ID NO: 5342 - DNA, 21 bp, Artificial Sequence
  Description of Artificial Sequence: Synthetic Light chain variable region CDR L2 nucleic acid sequence
tgggcatctacccgggaatcc

SEQ ID NO: 5343 - protein, 8 aa, Artificial Sequence
  Description of Artificial Sequence: Synthetic Light chain variable region CDR L3 amino acid sequence
KQSYSRRT

SEQ ID NO: 5344 - DNA, 24 bp, Artificial Sequence
  Description of Artificial Sequence: Synthetic Light chain variable region CDR L3 nucleic acid sequence
aagcaatcttattctcggagaact

SEQ ID NO: 5345 - DNA, 357 bp, Artificial Sequence
  Description of Artificial Sequence: Synthetic Heavy chain variable region nucleic acid sequence
caggtgcagctggtgcagtctggggctgaggtgaagaagcctggggcctcagtgaaggtctcctgcaaggcttctggattcaacatcaaggactactatatgcactgggtgcgacaggctcctggacaaaggcttgagtggatgggatggatcgaccttgaaaatgctaacacaatctatgacgctaagtttcagggcagggtcaccataaccagggacacgtccgccagcacagcctacatggagctgagcagcctgagatctgaagacacggcggtgtactactgcgcgagagataattacggggggtatttttacgacgtgtggggccaaggaaccctggtcaccgtctcctca

SEQ ID NO: 5346 - protein, 119 aa, Artificial Sequence
  Description of Artificial Sequence: Synthetic Heavy chain variable region amino acid sequence
QVQLVQSGAEVKKPGASVKVSCKASGFNIKDYYMHWVRQAPGQRLEWMGWIDLENANTIYDAKFQGRVTITRDTSASTAYMELSSLRSEDTAVYYCARDNYGGYFYDVWGQGTLVTVSS

SEQ ID NO: 5347 - protein, 9 aa, Artificial Sequence
  Description of Artificial Sequence: Synthetic Heavy chain variable region CDR H1 amino acid sequence
FNIKDYYMH

SEQ ID NO: 5348 - DNA, 27 bp, Artificial Sequence
  Description of Artificial Sequence: Synthetic Heavy chain variable region CDR H1 nucleic acid sequence
ttcaacatcaaggactactatatgcac

SEQ ID NO: 5349 - protein, 17 aa, Artificial Sequence
  Description of Artificial Sequence: Synthetic Heavy chain variable region CDR H2 amino acid sequence
WIDLENANTIYDAKFQG

SEQ ID NO: 5350 - DNA, 51 bp, Artificial Sequence; identical to SEQ ID NO: 4662
  Description of Artificial Sequence: Synthetic Heavy chain variable region CDR H2 nucleic acid sequence

SEQ ID NO: 5351 - protein, 12 aa, Artificial Sequence
  Description of Artificial Sequence: Synthetic Heavy chain variable region CDR H3 amino acid sequence
ARDNYGGYFYDV

SEQ ID NO: 5352 - DNA, 36 bp, Artificial Sequence
  Description of Artificial Sequence: Synthetic Heavy chain variable region CDR H3 nucleic acid sequence
gcgagagataattacggggggtatttttacgacgtg

SEQ ID NO: 5353 - DNA, 336 bp, Artificial Sequence; identical to SEQ ID NO: 4537
  Description of Artificial Sequence: Synthetic Light chain variable region nucleic acid sequence

SEQ ID NO: 5354 - protein, 112 aa, Artificial Sequence; identical to SEQ ID NO: 4538
  Description of Artificial Sequence: Synthetic Light chain variable region amino acid sequence

SEQ ID NO: 5355 - protein, 17 aa, Artificial Sequence
  Description of Artificial Sequence: Synthetic Light chain variable region CDR L1 amino acid sequence
KSSQSLLNARTGKNYLA

SEQ ID NO: 5356 - DNA, 51 bp, Artificial Sequence; identical to SEQ ID NO: 4540
  Description of Artificial Sequence: Synthetic Light chain variable region CDR L1 nucleic acid sequence

SEQ ID NO: 5357 - protein, 7 aa, Artificial Sequence
  Description of Artificial Sequence: Synthetic Light chain variable region CDR L2 amino acid sequence
WASTRES

SEQ ID NO: 5358 - DNA, 21 bp, Artificial Sequence
  Description of Artificial Sequence: Synthetic Light chain variable region CDR L2 nucleic acid sequence
tgggcatctacccgggaatcc

SEQ ID NO: 5359 - protein, 8 aa, Artificial Sequence
  Description of Artificial Sequence: Synthetic Light chain variable region CDR L3 amino acid sequence
KQSYSRRT

SEQ ID NO: 5360 - DNA, 24 bp, Artificial Sequence
  Description of Artificial Sequence: Synthetic Light chain variable region CDR L3 nucleic acid sequence
aagcaatcttattctcggagaact

SEQ ID NO: 5361 - DNA, 357 bp, Artificial Sequence; identical to SEQ ID NO: 4705
  Description of Artificial Sequence: Synthetic Heavy chain variable region nucleic acid sequence

SEQ ID NO: 5362 - protein, 119 aa, Artificial Sequence; identical to SEQ ID NO: 4706
  Description of Artificial Sequence: Synthetic Heavy chain variable region amino acid sequence

SEQ ID NO: 5363 - protein, 9 aa, Artificial Sequence
  Description of Artificial Sequence: Synthetic Heavy chain variable region CDR H1 amino acid sequence
FNIKDYYMH

SEQ ID NO: 5364 - DNA, 27 bp, Artificial Sequence
  Description of Artificial Sequence: Synthetic Heavy chain variable region CDR H1 nucleic acid sequence
ttcaacatcaaggactactatatgcac

SEQ ID NO: 5365 - protein, 17 aa, Artificial Sequence
  Description of Artificial Sequence: Synthetic Heavy chain variable region CDR H2 amino acid sequence
WIDLENANTIYDAKFQG

SEQ ID NO: 5366 - DNA, 51 bp, Artificial Sequence; identical to SEQ ID NO: 4662
  Description of Artificial Sequence: Synthetic Heavy chain variable region CDR H2 nucleic acid sequence

SEQ ID NO: 5367 - protein, 12 aa, Artificial Sequence
  Description of Artificial Sequence: Synthetic Heavy chain variable region CDR H3 amino acid sequence
ARDAYGRYFYDV

SEQ ID NO: 5368 - DNA, 36 bp, Artificial Sequence; identical to SEQ ID NO: 4568
  Description of Artificial Sequence: Synthetic Heavy chain variable region CDR H3 nucleic acid sequence

SEQ ID NO: 5369 - DNA, 336 bp, Artificial Sequence
  Description of Artificial Sequence: Synthetic Light chain variable region nucleic acid sequence
gacatcgtgatgacccagtctccagactccctggctgtgtctctgggcgagagggccaccatcaactgcaagtccagccagagtcttttaaacgctagaaccggaaagaactacttagcttggtaccagcagaaaccaggacagcctcctaagctgctcatttactgggcatctacccgggaatccggggtccctgaccgattcagtggcagcgggtctgggacagacttcactctcactatcagtagcctgcaggctgaagatgtggcagtttattactgtaagcaatcttattctctgagaactttcggcggagggaccaaggtcgagatcaaa

SEQ ID NO: 5370 - protein, 112 aa, Artificial Sequence
  Description of Artificial Sequence: Synthetic Light chain variable region amino acid sequence
DIVMTQSPDSLAVSLGERATINCKSSQSLLNARTGKNYLAWYQQKPGQPPKLLIYWASTRESGVPDRFSGSGSGTDFTLTISSLQAEDVAVYYCKQSYSLRTFGGGTKVEIK

SEQ ID NO: 5371 - protein, 17 aa, Artificial Sequence
  Description of Artificial Sequence: Synthetic Light chain variable region CDR L1 amino acid sequence
KSSQSLLNARTGKNYLA

SEQ ID NO: 5372 - DNA, 51 bp, Artificial Sequence; identical to SEQ ID NO: 4540
  Description of Artificial Sequence: Synthetic Light chain variable region CDR L1 nucleic acid sequence

SEQ ID NO: 5373 - protein, 7 aa, Artificial Sequence
  Description of Artificial Sequence: Synthetic Light chain variable region CDR L2 amino acid sequence
WASTRES

SEQ ID NO: 5374 - DNA, 21 bp, Artificial Sequence
  Description of Artificial Sequence: Synthetic Light chain variable region CDR L2 nucleic acid sequence
tgggcatctacccgggaatcc

SEQ ID NO: 5375 - protein, 8 aa, Artificial Sequence
  Description of Artificial Sequence: Synthetic Light chain variable region CDR L3 amino acid sequence
KQSYSLRT

SEQ ID NO: 5376 - DNA, 24 bp, Artificial Sequence
  Description of Artificial Sequence: Synthetic Light chain variable region CDR L3 nucleic acid sequence
aagcaatcttattctctgagaact

SEQ ID NO: 5377 - DNA, 357 bp, Artificial Sequence; identical to SEQ ID NO: 5201
  Description of Artificial Sequence: Synthetic Heavy chain variable region nucleic acid sequence

SEQ ID NO: 5378 - protein, 119 aa, Artificial Sequence; identical to SEQ ID NO: 5202
  Description of Artificial Sequence: Synthetic Heavy chain variable region amino acid sequence

SEQ ID NO: 5379 - protein, 9 aa, Artificial Sequence
  Description of Artificial Sequence: Synthetic Heavy chain variable region CDR H1 amino acid sequence
FNIKDYYMH

SEQ ID NO: 5380 - DNA, 27 bp, Artificial Sequence
  Description of Artificial Sequence: Synthetic Heavy chain variable region CDR H1 nucleic acid sequence
ttcaacatcaaggactactatatgcac

SEQ ID NO: 5381 - protein, 17 aa, Artificial Sequence
  Description of Artificial Sequence: Synthetic Heavy chain variable region CDR H2 amino acid sequence
WIDLENANTIYDAKFQG

SEQ ID NO: 5382 - DNA, 51 bp, Artificial Sequence; identical to SEQ ID NO: 4662
  Description of Artificial Sequence: Synthetic Heavy chain variable region CDR H2 nucleic acid sequence

SEQ ID NO: 5383 - protein, 12 aa, Artificial Sequence
  Description of Artificial Sequence: Synthetic Heavy chain variable region CDR H3 amino acid sequence
GRDAYGRYFYDV

SEQ ID NO: 5384 - DNA, 36 bp, Artificial Sequence; identical to SEQ ID NO: 5208
  Description of Artificial Sequence: Synthetic Heavy chain variable region CDR H3 nucleic acid sequence

SEQ ID NO: 5385 - DNA, 336 bp, Artificial Sequence; identical to SEQ ID NO: 5369
  Description of Artificial Sequence: Synthetic Light chain variable region nucleic acid sequence

SEQ ID NO: 5386 - protein, 112 aa, Artificial Sequence; identical to SEQ ID NO: 5370
  Description of Artificial Sequence: Synthetic Light chain variable region amino acid sequence

SEQ ID NO: 5387 - protein, 17 aa, Artificial Sequence
  Description of Artificial Sequence: Synthetic Light chain variable region CDR L1 amino acid sequence
KSSQSLLNARTGKNYLA

SEQ ID NO: 5388 - DNA, 51 bp, Artificial Sequence; identical to SEQ ID NO: 4540
  Description of Artificial Sequence: Synthetic Light chain variable region CDR L1 nucleic acid sequence

SEQ ID NO: 5389 - protein, 7 aa, Artificial Sequence
  Description of Artificial Sequence: Synthetic Light chain variable region CDR L2 amino acid sequence
WASTRES

SEQ ID NO: 5390 - DNA, 21 bp, Artificial Sequence
  Description of Artificial Sequence: Synthetic Light chain variable region CDR L2 nucleic acid sequence
tgggcatctacccgggaatcc

SEQ ID NO: 5391 - protein, 8 aa, Artificial Sequence
  Description of Artificial Sequence: Synthetic Light chain variable region CDR L3 amino acid sequence
KQSYSLRT

SEQ ID NO: 5392 - DNA, 24 bp, Artificial Sequence
  Description of Artificial Sequence: Synthetic Light chain variable region CDR L3 nucleic acid sequence
aagcaatcttattctctgagaact

SEQ ID NO: 5393 - DNA, 357 bp, Artificial Sequence; identical to SEQ ID NO: 5217
  Description of Artificial Sequence: Synthetic Heavy chain variable region nucleic acid sequence

SEQ ID NO: 5394 - protein, 119 aa, Artificial Sequence; identical to SEQ ID NO: 5218
  Description of Artificial Sequence: Synthetic Heavy chain variable region amino acid sequence

SEQ ID NO: 5395 - protein, 9 aa, Artificial Sequence
  Description of Artificial Sequence: Synthetic Heavy chain variable region CDR H1 amino acid sequence
FNIKDYYMH

SEQ ID NO: 5396 - DNA, 27 bp, Artificial Sequence
  Description of Artificial Sequence: Synthetic Heavy chain variable region CDR H1 nucleic acid sequence
ttcaacatcaaggactactatatgcac

SEQ ID NO: 5397 - protein, 17 aa, Artificial Sequence
  Description of Artificial Sequence: Synthetic Heavy chain variable region CDR H2 amino acid sequence
WIDLEEGNTIYDAKFQG

SEQ ID NO: 5398 - DNA, 51 bp, Artificial Sequence; identical to SEQ ID NO: 5222
  Description of Artificial Sequence: Synthetic Heavy chain variable region CDR H2 nucleic acid sequence

SEQ ID NO: 5399 - protein, 12 aa, Artificial Sequence
  Description of Artificial Sequence: Synthetic Heavy chain variable region CDR H3 amino acid sequence
ARDAYGRYFYDV

SEQ ID NO: 5400 - DNA, 36 bp, Artificial Sequence; identical to SEQ ID NO: 4568
  Description of Artificial Sequence: Synthetic Heavy chain variable region CDR H3 nucleic acid sequence

SEQ ID NO: 5401 - DNA, 336 bp, Artificial Sequence; identical to SEQ ID NO: 5369
  Description of Artificial Sequence: Synthetic Light chain variable region nucleic acid sequence

SEQ ID NO: 5402 - protein, 112 aa, Artificial Sequence; identical to SEQ ID NO: 5370
  Description of Artificial Sequence: Synthetic Light chain variable region amino acid sequence

SEQ ID NO: 5403 - protein, 17 aa, Artificial Sequence
  Description of Artificial Sequence: Synthetic Light chain variable region CDR L1 amino acid sequence
KSSQSLLNARTGKNYLA

SEQ ID NO: 5404 - DNA, 51 bp, Artificial Sequence; identical to SEQ ID NO: 4540
  Description of Artificial Sequence: Synthetic Light chain variable region CDR L1 nucleic acid sequence

SEQ ID NO: 5405 - protein, 7 aa, Artificial Sequence
  Description of Artificial Sequence: Synthetic Light chain variable region CDR L2 amino acid sequence
WASTRES

SEQ ID NO: 5406 - DNA, 21 bp, Artificial Sequence
  Description of Artificial Sequence: Synthetic Light chain variable region CDR L2 nucleic acid sequence
tgggcatctacccgggaatcc

SEQ ID NO: 5407 - protein, 8 aa, Artificial Sequence
  Description of Artificial Sequence: Synthetic Light chain variable region CDR L3 amino acid sequence
KQSYSLRT

SEQ ID NO: 5408 - DNA, 24 bp, Artificial Sequence
  Description of Artificial Sequence: Synthetic Light chain variable region CDR L3 nucleic acid sequence
aagcaatcttattctctgagaact

SEQ ID NO: 5409 - DNA, 357 bp, Artificial Sequence
  Description of Artificial Sequence: Synthetic Heavy chain variable region nucleic acid sequence
caggtgcagctggtgcagtctggggctgaggtgaagaagcctggggcctcagtgaaggtctcctgcaaggcttctggattcaacatcaaggactactatatgcactgggtgcgacaggctcctggacaaaggcttgagtggatgggatggatcgaccttgaaaatgctaacacaatctatgacgctaagtttcagggcagggtcaccataaccagggacacgtccgccagcacagcctacatggagctgagcagcctgagatctgaagacacggcggtgtactactgcggtagagatgcgtacgggctgtatttttacgacgtgtggggccaaggaaccctggtcaccgtctcctca

SEQ ID NO: 5410 - protein, 119 aa, Artificial Sequence
  Description of Artificial Sequence: Synthetic Heavy chain variable region amino acid sequence
QVQLVQSGAEVKKPGASVKVSCKASGFNIKDYYMHWVRQAPGQRLEWMGWIDLENANTIYDAKFQGRVTITRDTSASTAYMELSSLRSEDTAVYYCGRDAYGLYFYDVWGQGTLVTVSS

SEQ ID NO: 5411 - protein, 9 aa, Artificial Sequence
  Description of Artificial Sequence: Synthetic Heavy chain variable region CDR H1 amino acid sequence
FNIKDYYMH

SEQ ID NO: 5412 - DNA, 27 bp, Artificial Sequence
  Description of Artificial Sequence: Synthetic Heavy chain variable region CDR H1 nucleic acid sequence
ttcaacatcaaggactactatatgcac

SEQ ID NO: 5413 - protein, 17 aa, Artificial Sequence
  Description of Artificial Sequence: Synthetic Heavy chain variable region CDR H2 amino acid sequence
WIDLENANTIYDAKFQG

SEQ ID NO: 5414 - DNA, 51 bp, Artificial Sequence; identical to SEQ ID NO: 4662
  Description of Artificial Sequence: Synthetic Heavy chain variable region CDR H2 nucleic acid sequence

SEQ ID NO: 5415 - protein, 12 aa, Artificial Sequence
  Description of Artificial Sequence: Synthetic Heavy chain variable region CDR H3 amino acid sequence
GRDAYGLYFYDV

SEQ ID NO: 5416 - DNA, 36 bp, Artificial Sequence
  Description of Artificial Sequence: Synthetic Heavy chain variable region CDR H3 nucleic acid sequence
ggtagagatgcgtacgggctgtatttttacgacgtg

SEQ ID NO: 5417 - DNA, 336 bp, Artificial Sequence; identical to SEQ ID NO: 5369
  Description of Artificial Sequence: Synthetic Light chain variable region nucleic acid sequence

SEQ ID NO: 5418 - protein, 112 aa, Artificial Sequence; identical to SEQ ID NO: 5370
  Description of Artificial Sequence: Synthetic Light chain variable region amino acid sequence

SEQ ID NO: 5419 - protein, 17 aa, Artificial Sequence
  Description of Artificial Sequence: Synthetic Light chain variable region CDR L1 amino acid sequence
KSSQSLLNARTGKNYLA

SEQ ID NO: 5420 - DNA, 51 bp, Artificial Sequence; identical to SEQ ID NO: 4540
  Description of Artificial Sequence: Synthetic Light chain variable region CDR L1 nucleic acid sequence

SEQ ID NO: 5421 - protein, 7 aa, Artificial Sequence
  Description of Artificial Sequence: Synthetic Light chain variable region CDR L2 amino acid sequence
WASTRES

SEQ ID NO: 5422 - DNA, 21 bp, Artificial Sequence
  Description of Artificial Sequence: Synthetic Light chain variable region CDR L2 nucleic acid sequence
tgggcatctacccgggaatcc

SEQ ID NO: 5423 - protein, 8 aa, Artificial Sequence
  Description of Artificial Sequence: Synthetic Light chain variable region CDR L3 amino acid sequence
KQSYSLRT

SEQ ID NO: 5424 - DNA, 24 bp, Artificial Sequence
  Description of Artificial Sequence: Synthetic Light chain variable region CDR L3 nucleic acid sequence
aagcaatcttattctctgagaact

SEQ ID NO: 5425 - DNA, 357 bp, Artificial Sequence; identical to SEQ ID NO: 5265
  Description of Artificial Sequence: Synthetic Heavy chain variable region nucleic acid sequence

SEQ ID NO: 5426 - protein, 119 aa, Artificial Sequence; identical to SEQ ID NO: 5266
  Description of Artificial Sequence: Synthetic Heavy chain variable region amino acid sequence

SEQ ID NO: 5427 - protein, 9 aa, Artificial Sequence
  Description of Artificial Sequence: Synthetic Heavy chain variable region CDR H1 amino acid sequence
FNIKDYYMH

SEQ ID NO: 5428 - DNA, 27 bp, Artificial Sequence
  Description of Artificial Sequence: Synthetic Heavy chain variable region CDR H1 nucleic acid sequence
ttcaacatcaaggactactatatgcac

SEQ ID NO: 5429 - protein, 17 aa, Artificial Sequence
  Description of Artificial Sequence: Synthetic Heavy chain variable region CDR H2 amino acid sequence
WIDLENANTIYDAKFQG

SEQ ID NO: 5430 - DNA, 51 bp, Artificial Sequence; identical to SEQ ID NO: 4662
  Description of Artificial Sequence: Synthetic Heavy chain variable region CDR H2 nucleic acid sequence

SEQ ID NO: 5431 - protein, 12 aa, Artificial Sequence
  Description of Artificial Sequence: Synthetic Heavy chain variable region CDR H3 amino acid sequence
ARDVLGRYFYDV

SEQ ID NO: 5432 - DNA, 36 bp, Artificial Sequence; identical to SEQ ID NO: 5272
  Description of Artificial Sequence: Synthetic Heavy chain variable region CDR H3 nucleic acid sequence

SEQ ID NO: 5433 - DNA, 336 bp, Artificial Sequence; identical to SEQ ID NO: 5369
  Description of Artificial Sequence: Synthetic Light chain variable region nucleic acid sequence

SEQ ID NO: 5434 - protein, 112 aa, Artificial Sequence; identical to SEQ ID NO: 5370
  Description of Artificial Sequence: Synthetic Light chain variable region amino acid sequence

SEQ ID NO: 5435 - protein, 17 aa, Artificial Sequence
  Description of Artificial Sequence: Synthetic Light chain variable region CDR L1 amino acid sequence
KSSQSLLNARTGKNYLA

SEQ ID NO: 5436 - DNA, 51 bp, Artificial Sequence; identical to SEQ ID NO: 4540
  Description of Artificial Sequence: Synthetic Light chain variable region CDR L1 nucleic acid sequence

SEQ ID NO: 5437 - protein, 7 aa, Artificial Sequence
  Description of Artificial Sequence: Synthetic Light chain variable region CDR L2 amino acid sequence
WASTRES

SEQ ID NO: 5438 - DNA, 21 bp, Artificial Sequence
  Description of Artificial Sequence: Synthetic Light chain variable region CDR L2 nucleic acid sequence
tgggcatctacccgggaatcc

SEQ ID NO: 5439 - protein, 8 aa, Artificial Sequence
  Description of Artificial Sequence: Synthetic Light chain variable region CDR L3 amino acid sequence
KQSYSLRT

SEQ ID NO: 5440 - DNA, 24 bp, Artificial Sequence
  Description of Artificial Sequence: Synthetic Light chain variable region CDR L3 nucleic acid sequence
aagcaatcttattctctgagaact

SEQ ID NO: 5441 - DNA, 357 bp, Artificial Sequence
  Description of Artificial Sequence: Synthetic Heavy chain variable region nucleic acid sequence
caggtgcagctggtgcagtctggggctgaggtgaagaagcctggggcctcagtgaaggtctcctgcaaggcttctggattcaacatcaaggactactatatgcactgggtgcgacaggctcctggacaaaggcttgagtggatgggatggatcgaccttgaagagggcaacacaatctatgacgctaagtttcagggcagggtcaccataaccagggacacgtccgccagcacagcctacatggagctgagcagcctgagatctgaagacacggcggtgtactactgcgcgagagatcgttacggggcttatttttacgacgtgtggggccaaggaaccctggtcaccgtctcctca

SEQ ID NO: 5442 - protein, 119 aa, Artificial Sequence
  Description of Artificial Sequence: Synthetic Heavy chain variable region amino acid sequence
QVQLVQSGAEVKKPGASVKVSCKASGFNIKDYYMHWVRQAPGQRLEWMGWIDLEEGNTIYDAKFQGRVTITRDTSASTAYMELSSLRSEDTAVYYCARDRYGAYFYDVWGQGTLVTVSS

SEQ ID NO: 5443 - protein, 9 aa, Artificial Sequence
  Description of Artificial Sequence: Synthetic Heavy chain variable region CDR H1 amino acid sequence
FNIKDYYMH

SEQ ID NO: 5444 - DNA, 27 bp, Artificial Sequence
  Description of Artificial Sequence: Synthetic Heavy chain variable region CDR H1 nucleic acid sequence
ttcaacatcaaggactactatatgcac

SEQ ID NO: 5445 - protein, 17 aa, Artificial Sequence
  Description of Artificial Sequence: Synthetic Heavy chain variable region CDR H2 amino acid sequence
WIDLEEGNTIYDAKFQG

SEQ ID NO: 5446 - DNA, 51 bp, Artificial Sequence; identical to SEQ ID NO: 5222
  Description of Artificial Sequence: Synthetic Heavy chain variable region CDR H2 nucleic acid sequence

SEQ ID NO: 5447 - protein, 12 aa, Artificial Sequence
  Description of Artificial Sequence: Synthetic Heavy chain variable region CDR H3 amino acid sequence
ARDRYGAYFYDV

SEQ ID NO: 5448 - DNA, 36 bp, Artificial Sequence; identical to SEQ ID NO: 5256
  Description of Artificial Sequence: Synthetic Heavy chain variable region CDR H3 nucleic acid sequence

SEQ ID NO: 5449 - DNA, 336 bp, Artificial Sequence; identical to SEQ ID NO: 5369
  Description of Artificial Sequence: Synthetic Light chain variable region nucleic acid sequence

SEQ ID NO: 5450 - protein, 112 aa, Artificial Sequence; identical to SEQ ID NO: 5370
  Description of Artificial Sequence: Synthetic Light chain variable region amino acid sequence

SEQ ID NO: 5451 - protein, 17 aa, Artificial Sequence
  Description of Artificial Sequence: Synthetic Light chain variable region CDR L1 amino acid sequence
KSSQSLLNARTGKNYLA

SEQ ID NO: 5452 - DNA, 51 bp, Artificial Sequence; identical to SEQ ID NO: 4540
  Description of Artificial Sequence: Synthetic Light chain variable region CDR L1 nucleic acid sequence

SEQ ID NO: 5453 - protein, 7 aa, Artificial Sequence
  Description of Artificial Sequence: Synthetic Light chain variable region CDR L2 amino acid sequence
WASTRES

SEQ ID NO: 5454 - DNA, 21 bp, Artificial Sequence
  Description of Artificial Sequence: Synthetic Light chain variable region CDR L2 nucleic acid sequence
tgggcatctacccgggaatcc

SEQ ID NO: 5455 - protein, 8 aa, Artificial Sequence
  Description of Artificial Sequence: Synthetic Light chain variable region CDR L3 amino acid sequence
KQSYSLRT

SEQ ID NO: 5456 - DNA, 24 bp, Artificial Sequence
  Description of Artificial Sequence: Synthetic Light chain variable region CDR L3 nucleic acid sequence
aagcaatcttattctctgagaact

SEQ ID NO: 5457 - DNA, 357 bp, Artificial Sequence
  Description of Artificial Sequence: Synthetic Heavy chain variable region nucleic acid sequence
caggtgcagctggtgcagtctggggctgaggtgaagaagcctggggcctcagtgaaggtctcctgcaaggcttctggattcaacatcaaggactactatatgcactgggtgcgacaggctcctggacaaaggcttgagtggatgggatggatcgaccttgaagagggcaacacaatctatgacgctaagtttcagggcagggtcaccataaccagggacacgtccgccagcacagcctacatggagctgagcagcctgagatctgaagacacggcggtgtactactgcggtagagatgcgtacgggctgtatttttacgacgtgtggggccaaggaaccctggtcaccgtctcctca

SEQ ID NO: 5458 - protein, 119 aa, Artificial Sequence
  Description of Artificial Sequence: Synthetic Heavy chain variable region amino acid sequence
QVQLVQSGAEVKKPGASVKVSCKASGFNIKDYYMHWVRQAPGQRLEWMGWIDLEEGNTIYDAKFQGRVTITRDTSASTAYMELSSLRSEDTAVYYCGRDAYGLYFYDVWGQGTLVTVSS

SEQ ID NO: 5459 - protein, 9 aa, Artificial Sequence
  Description of Artificial Sequence: Synthetic Heavy chain variable region CDR H1 amino acid sequence
FNIKDYYMH

SEQ ID NO: 5460 - DNA, 27 bp, Artificial Sequence
  Description of Artificial Sequence: Synthetic Heavy chain variable region CDR H1 nucleic acid sequence
ttcaacatcaaggactactatatgcac

SEQ ID NO: 5461 - protein, 17 aa, Artificial Sequence
  Description of Artificial Sequence: Synthetic Heavy chain variable region CDR H2 amino acid sequence
WIDLEEGNTIYDAKFQG

SEQ ID NO: 5462 - DNA, 51 bp, Artificial Sequence; identical to SEQ ID NO: 5222
  Description of Artificial Sequence: Synthetic Heavy chain variable region CDR H2 nucleic acid sequence

SEQ ID NO: 5463 - protein, 12 aa, Artificial Sequence
  Description of Artificial Sequence: Synthetic Heavy chain variable region CDR H3 amino acid sequence
GRDAYGLYFYDV

SEQ ID NO: 5464 - DNA, 36 bp, Artificial Sequence; identical to SEQ ID NO: 5416
  Description of Artificial Sequence: Synthetic Heavy chain variable region CDR H3 nucleic acid sequence

SEQ ID NO: 5465 - DNA, 336 bp, Artificial Sequence; identical to SEQ ID NO: 5369
  Description of Artificial Sequence: Synthetic Light chain variable region nucleic acid sequence

SEQ ID NO: 5466 - protein, 112 aa, Artificial Sequence; identical to SEQ ID NO: 5370
  Description of Artificial Sequence: Synthetic Light chain variable region amino acid sequence

SEQ ID NO: 5467 - protein, 17 aa, Artificial Sequence
  Description of Artificial Sequence: Synthetic Light chain variable region CDR L1 amino acid sequence
KSSQSLLNARTGKNYLA

SEQ ID NO: 5468 - DNA, 51 bp, Artificial Sequence; identical to SEQ ID NO: 4540
  Description of Artificial Sequence: Synthetic Light chain variable region CDR L1 nucleic acid sequence

SEQ ID NO: 5469 - protein, 7 aa, Artificial Sequence
  Description of Artificial Sequence: Synthetic Light chain variable region CDR L2 amino acid sequence
WASTRES

SEQ ID NO: 5470 - DNA, 21 bp, Artificial Sequence
  Description of Artificial Sequence: Synthetic Light chain variable region CDR L2 nucleic acid sequence
tgggcatctacccgggaatcc

SEQ ID NO: 5471 - protein, 8 aa, Artificial Sequence
  Description of Artificial Sequence: Synthetic Light chain variable region CDR L3 amino acid sequence
KQSYSLRT

SEQ ID NO: 5472 - DNA, 24 bp, Artificial Sequence
  Description of Artificial Sequence: Synthetic Light chain variable region CDR L3 nucleic acid sequence
aagcaatcttattctctgagaact

SEQ ID NO: 5473 - DNA, 357 bp, Artificial Sequence; identical to SEQ ID NO: 5297
  Description of Artificial Sequence: Synthetic Heavy chain variable region nucleic acid sequence

SEQ ID NO: 5474 - protein, 119 aa, Artificial Sequence; identical to SEQ ID NO: 5298
  Description of Artificial Sequence: Synthetic Heavy chain variable region amino acid sequence

SEQ ID NO: 5475 - protein, 9 aa, Artificial Sequence
  Description of Artificial Sequence: Synthetic Heavy chain variable region CDR H1 amino acid sequence
FNIKDYYMH

SEQ ID NO: 5476 - DNA, 27 bp, Artificial Sequence
  Description of Artificial Sequence: Synthetic Heavy chain variable region CDR H1 nucleic acid sequence
ttcaacatcaaggactactatatgcac

SEQ ID NO: 5477 - protein, 17 aa, Artificial Sequence
  Description of Artificial Sequence: Synthetic Heavy chain variable region CDR H2 amino acid sequence
WIDLEEGNTIYDAKFQG

SEQ ID NO: 5478 - DNA, 51 bp, Artificial Sequence; identical to SEQ ID NO: 5222
  Description of Artificial Sequence: Synthetic Heavy chain variable region CDR H2 nucleic acid sequence

SEQ ID NO: 5479 - protein, 12 aa, Artificial Sequence
  Description of Artificial Sequence: Synthetic Heavy chain variable region CDR H3 amino acid sequence
ARDVLGRYFYDV

SEQ ID NO: 5480 - DNA, 36 bp, Artificial Sequence; identical to SEQ ID NO: 5272
  Description of Artificial Sequence: Synthetic Heavy chain variable region CDR H3 nucleic acid sequence

SEQ ID NO: 5481 - DNA, 336 bp, Artificial Sequence; identical to SEQ ID NO: 5369
  Description of Artificial Sequence: Synthetic Light chain variable region nucleic acid sequence

SEQ ID NO: 5482 - protein, 112 aa, Artificial Sequence; identical to SEQ ID NO: 5370
  Description of Artificial Sequence: Synthetic Light chain variable region amino acid sequence

SEQ ID NO: 5483 - protein, 17 aa, Artificial Sequence
  Description of Artificial Sequence: Synthetic Light chain variable region CDR L1 amino acid sequence
KSSQSLLNARTGKNYLA

SEQ ID NO: 5484 - DNA, 51 bp, Artificial Sequence; identical to SEQ ID NO: 4540
  Description of Artificial Sequence: Synthetic Light chain variable region CDR L1 nucleic acid sequence

SEQ ID NO: 5485 - protein, 7 aa, Artificial Sequence
  Description of Artificial Sequence: Synthetic Light chain variable region CDR L2 amino acid sequence
WASTRES

SEQ ID NO: 5486 - DNA, 21 bp, Artificial Sequence
  Description of Artificial Sequence: Synthetic Light chain variable region CDR L2 nucleic acid sequence
tgggcatctacccgggaatcc

SEQ ID NO: 5487 - protein, 8 aa, Artificial Sequence
  Description of Artificial Sequence: Synthetic Light chain variable region CDR L3 amino acid sequence
KQSYSLRT

SEQ ID NO: 5488 - DNA, 24 bp, Artificial Sequence
  Description of Artificial Sequence: Synthetic Light chain variable region CDR L3 nucleic acid sequence
aagcaatcttattctctgagaact

SEQ ID NO: 5489 - DNA, 357 bp, Artificial Sequence; identical to SEQ ID NO: 5313
  Description of Artificial Sequence: Synthetic Heavy chain variable region nucleic acid sequence

SEQ ID NO: 5490 - protein, 119 aa, Artificial Sequence; identical to SEQ ID NO: 5314
  Description of Artificial Sequence: Synthetic Heavy chain variable region amino acid sequence

SEQ ID NO: 5491 - protein, 9 aa, Artificial Sequence
  Description of Artificial Sequence: Synthetic Heavy chain variable region CDR H1 amino acid sequence
FNIKDYYMH

SEQ ID NO: 5492 - DNA, 27 bp, Artificial Sequence
  Description of Artificial Sequence: Synthetic Heavy chain variable region CDR H1 nucleic acid sequence
ttcaacatcaaggactactatatgcac

SEQ ID NO: 5493 - protein, 17 aa, Artificial Sequence
  Description of Artificial Sequence: Synthetic Heavy chain variable region CDR H2 amino acid sequence
WIDLENANTIYDAKFQG

SEQ ID NO: 5494 - DNA, 51 bp, Artificial Sequence; identical to SEQ ID NO: 4662
  Description of Artificial Sequence: Synthetic Heavy chain variable region CDR H2 nucleic acid sequence

SEQ ID NO: 5495 - protein, 12 aa, Artificial Sequence
  Description of Artificial Sequence: Synthetic Heavy chain variable region CDR H3 amino acid sequence
ARDVYGRYFYDL

SEQ ID NO: 5496 - DNA, 36 bp, Artificial Sequence; identical to SEQ ID NO: 5320
  Description of Artificial Sequence: Synthetic Heavy chain variable region CDR H3 nucleic acid sequence

SEQ ID NO: 5497 - DNA, 336 bp, Artificial Sequence; identical to SEQ ID NO: 5369
  Description of Artificial Sequence: Synthetic Light chain variable region nucleic acid sequence

SEQ ID NO: 5498 - protein, 112 aa, Artificial Sequence; identical to SEQ ID NO: 5370
  Description of Artificial Sequence: Synthetic Light chain variable region amino acid sequence

SEQ ID NO: 5499 - protein, 17 aa, Artificial Sequence
  Description of Artificial Sequence: Synthetic Light chain variable region CDR L1 amino acid sequence
KSSQSLLNARTGKNYLA

SEQ ID NO: 5500 - DNA, 51 bp, Artificial Sequence; identical to SEQ ID NO: 4540
  Description of Artificial Sequence: Synthetic Light chain variable region CDR L1 nucleic acid sequence

SEQ ID NO: 5501 - protein, 7 aa, Artificial Sequence
  Description of Artificial Sequence: Synthetic Light chain variable region CDR L2 amino acid sequence
WASTRES

SEQ ID NO: 5502 - DNA, 21 bp, Artificial Sequence
  Description of Artificial Sequence: Synthetic Light chain variable region CDR L2 nucleic acid sequence
tgggcatctacccgggaatcc

SEQ ID NO: 5503 - protein, 8 aa, Artificial Sequence
  Description of Artificial Sequence: Synthetic Light chain variable region CDR L3 amino acid sequence
KQSYSLRT

SEQ ID NO: 5504 - DNA, 24 bp, Artificial Sequence
  Description of Artificial Sequence: Synthetic Light chain variable region CDR L3 nucleic acid sequence
aagcaatcttattctctgagaact

SEQ ID NO: 5505 - DNA, 357 bp, Artificial Sequence; identical to SEQ ID NO: 5345
  Description of Artificial Sequence: Synthetic Heavy chain variable region nucleic acid sequence

SEQ ID NO: 5506 - protein, 119 aa, Artificial Sequence; identical to SEQ ID NO: 5346
  Description of Artificial Sequence: Synthetic Heavy chain variable region amino acid sequence

SEQ ID NO: 5507 - protein, 9 aa, Artificial Sequence
  Description of Artificial Sequence: Synthetic Heavy chain variable region CDR H1 amino acid sequence
FNIKDYYMH

SEQ ID NO: 5508 - DNA, 27 bp, Artificial Sequence
  Description of Artificial Sequence: Synthetic Heavy chain variable region CDR H1 nucleic acid sequence
ttcaacatcaaggactactatatgcac

SEQ ID NO: 5509 - protein, 17 aa, Artificial Sequence
  Description of Artificial Sequence: Synthetic Heavy chain variable region CDR H2 amino acid sequence
WIDLENANTIYDAKFQG

SEQ ID NO: 5510 - DNA, 51 bp, Artificial Sequence; identical to SEQ ID NO: 4662
  Description of Artificial Sequence: Synthetic Heavy chain variable region CDR H2 nucleic acid sequence

SEQ ID NO: 5511 - protein, 12 aa, Artificial Sequence
  Description of Artificial Sequence: Synthetic Heavy chain variable region CDR H3 amino acid sequence
ARDNYGGYFYDV

SEQ ID NO: 5512 - DNA, 36 bp, Artificial Sequence; identical to SEQ ID NO: 5352
  Description of Artificial Sequence: Synthetic Heavy chain variable region CDR H3 nucleic acid sequence

SEQ ID NO: 5513 - DNA, 336 bp, Artificial Sequence; identical to SEQ ID NO: 5369
  Description of Artificial Sequence: Synthetic Light chain variable region nucleic acid sequence

SEQ ID NO: 5514 - protein, 112 aa, Artificial Sequence; identical to SEQ ID NO: 5370
  Description of Artificial Sequence: Synthetic Light chain variable region amino acid sequence

SEQ ID NO: 5515 - protein, 17 aa, Artificial Sequence
  Description of Artificial Sequence: Synthetic Light chain variable region CDR L1 amino acid sequence
KSSQSLLNARTGKNYLA

SEQ ID NO: 5516 - DNA, 51 bp, Artificial Sequence; identical to SEQ ID NO: 4540
  Description of Artificial Sequence: Synthetic Light chain variable region CDR L1 nucleic acid sequence

SEQ ID NO: 5517 - protein, 7 aa, Artificial Sequence
  Description of Artificial Sequence: Synthetic Light chain variable region CDR L2 amino acid sequence
WASTRES

SEQ ID NO: 5518 - DNA, 21 bp, Artificial Sequence
  Description of Artificial Sequence: Synthetic Light chain variable region CDR L2 nucleic acid sequence
tgggcatctacccgggaatcc

SEQ ID NO: 5519 - protein, 8 aa, Artificial Sequence
  Description of Artificial Sequence: Synthetic Light chain variable region CDR L3 amino acid sequence
KQSYSLRT

SEQ ID NO: 5520 - DNA, 24 bp, Artificial Sequence
  Description of Artificial Sequence: Synthetic Light chain variable region CDR L3 nucleic acid sequence
aagcaatcttattctctgagaact

SEQ ID NO: 5521 - DNA, 357 bp, Artificial Sequence; identical to SEQ ID NO: 4705
  Description of Artificial Sequence: Synthetic Heavy chain variable region nucleic acid sequence

SEQ ID NO: 5522 - protein, 119 aa, Artificial Sequence; identical to SEQ ID NO: 4706
  Description of Artificial Sequence: Synthetic Heavy chain variable region amino acid sequence

SEQ ID NO: 5523 - protein, 9 aa, Artificial Sequence
  Description of Artificial Sequence: Synthetic Heavy chain variable region CDR H1 amino acid sequence
FNIKDYYMH

SEQ ID NO: 5524 - DNA, 27 bp, Artificial Sequence
  Description of Artificial Sequence: Synthetic Heavy chain variable region CDR H1 nucleic acid sequence
ttcaacatcaaggactactatatgcac

SEQ ID NO: 5525 - protein, 17 aa, Artificial Sequence
  Description of Artificial Sequence: Synthetic Heavy chain variable region CDR H2 amino acid sequence
WIDLENANTIYDAKFQG

SEQ ID NO: 5526 - DNA, 51 bp, Artificial Sequence; identical to SEQ ID NO: 4662
  Description of Artificial Sequence: Synthetic Heavy chain variable region CDR H2 nucleic acid sequence

SEQ ID NO: 5527 - protein, 12 aa, Artificial Sequence
  Description of Artificial Sequence: Synthetic Heavy chain variable region CDR H3 amino acid sequence
ARDAYGRYFYDV

SEQ ID NO: 5528 - DNA, 36 bp, Artificial Sequence; identical to SEQ ID NO: 4568
  Description of Artificial Sequence: Synthetic Heavy chain variable region CDR H3 nucleic acid sequence

SEQ ID NO: 5529 - DNA, 336 bp, Artificial Sequence
  Description of Artificial Sequence: Synthetic Light chain variable region nucleic acid sequence
gacatcgtgatgacccagtctccagactccctggctgtgtctctgggcgagagggccaccatcaactgcaagtccagccagagtcttttaaacgctagaaccggaaagaactacttagcttggtaccagcagaaaccaggacagcctcctaagctgctcatttactgggcatctacccgggaatccggggtccctgaccgattcagtggcagcgggtctgggacagacttcactctcactatcagtagcctgcaggctgaagatgtggcagtttattactgtaagcaatcttattctatcagaactttcggcggagggaccaaggtcgagatcaaa

SEQ ID NO: 5530 - protein, 112 aa, Artificial Sequence
  Description of Artificial Sequence: Synthetic Light chain variable region amino acid sequence
DIVMTQSPDSLAVSLGERATINCKSSQSLLNARTGKNYLAWYQQKPGQPPKLLIYWASTRESGVPDRFSGSGSGTDFTLTISSLQAEDVAVYYCKQSYSIRTFGGGTKVEIK

SEQ ID NO: 5531 - protein, 17 aa, Artificial Sequence
  Description of Artificial Sequence: Synthetic Light chain variable region CDR L1 amino acid sequence
KSSQSLLNARTGKNYLA

SEQ ID NO: 5532 - DNA, 51 bp, Artificial Sequence; identical to SEQ ID NO: 4540
  Description of Artificial Sequence: Synthetic Light chain variable region CDR L1 nucleic acid sequence

SEQ ID NO: 5533 - protein, 7 aa, Artificial Sequence
  Description of Artificial Sequence: Synthetic Light chain variable region CDR L2 amino acid sequence
WASTRES

SEQ ID NO: 5534 - DNA, 21 bp, Artificial Sequence
  Description of Artificial Sequence: Synthetic Light chain variable region CDR L2 nucleic acid sequence
tgggcatctacccgggaatcc

SEQ ID NO: 5535 - protein, 8 aa, Artificial Sequence
  Description of Artificial Sequence: Synthetic Light chain variable region CDR L3 amino acid sequence
KQSYSIRT

SEQ ID NO: 5536 - DNA, 24 bp, Artificial Sequence
  Description of Artificial Sequence: Synthetic Light chain variable region CDR L3 nucleic acid sequence
aagcaatcttattctatcagaact

SEQ ID NO: 5537 - DNA, 357 bp, Artificial Sequence; identical to SEQ ID NO: 5265
  Description of Artificial Sequence: Synthetic Heavy chain variable region nucleic acid sequence

SEQ ID NO: 5538 - protein, 119 aa, Artificial Sequence; identical to SEQ ID NO: 5266
  Description of Artificial Sequence: Synthetic Heavy chain variable region amino acid sequence

SEQ ID NO: 5539 - protein, 9 aa, Artificial Sequence
  Description of Artificial Sequence: Synthetic Heavy chain variable region CDR H1 amino acid sequence
FNIKDYYMH

SEQ ID NO: 5540 - DNA, 27 bp, Artificial Sequence
  Description of Artificial Sequence: Synthetic Heavy chain variable region CDR H1 nucleic acid sequence
ttcaacatcaaggactactatatgcac

SEQ ID NO: 5541 - protein, 17 aa, Artificial Sequence
  Description of Artificial Sequence: Synthetic Heavy chain variable region CDR H2 amino acid sequence
WIDLENANTIYDAKFQG

SEQ ID NO: 5542 - DNA, 51 bp, Artificial Sequence; identical to SEQ ID NO: 4662
  Description of Artificial Sequence: Synthetic Heavy chain variable region CDR H2 nucleic acid sequence

SEQ ID NO: 5543 - protein, 12 aa, Artificial Sequence
  Description of Artificial Sequence: Synthetic Heavy chain variable region CDR H3 amino acid sequence
ARDVLGRYFYDV

SEQ ID NO: 5544 - DNA, 36 bp, Artificial Sequence; identical to SEQ ID NO: 5272
  Description of Artificial Sequence: Synthetic Heavy chain variable region CDR H3 nucleic acid sequence

SEQ ID NO: 5545 - DNA, 336 bp, Artificial Sequence; identical to SEQ ID NO: 5529
  Description of Artificial Sequence: Synthetic Light chain variable region nucleic acid sequence

SEQ ID NO: 5546 - protein, 112 aa, Artificial Sequence; identical to SEQ ID NO: 5530
  Description of Artificial Sequence: Synthetic Light chain variable region amino acid sequence

SEQ ID NO: 5547 - protein, 17 aa, Artificial Sequence
  Description of Artificial Sequence: Synthetic Light chain variable region CDR L1 amino acid sequence
KSSQSLLNARTGKNYLA

SEQ ID NO: 5548 - DNA, 51 bp, Artificial Sequence; identical to SEQ ID NO: 4540
  Description of Artificial Sequence: Synthetic Light chain variable region CDR L1 nucleic acid sequence

SEQ ID NO: 5549 - protein, 7 aa, Artificial Sequence
  Description of Artificial Sequence: Synthetic Light chain variable region CDR L2 amino acid sequence
WASTRES

SEQ ID NO: 5550 - DNA, 21 bp, Artificial Sequence
  Description of Artificial Sequence: Synthetic Light chain variable region CDR L2 nucleic acid sequence
tgggcatctacccgggaatcc

SEQ ID NO: 5551 - protein, 8 aa, Artificial Sequence
  Description of Artificial Sequence: Synthetic Light chain variable region CDR L3 amino acid sequence
KQSYSIRT

SEQ ID NO: 5552 - DNA, 24 bp, Artificial Sequence
  Description of Artificial Sequence: Synthetic Light chain variable region CDR L3 nucleic acid sequence
aagcaatcttattctatcagaact

SEQ ID NO: 5553 - DNA, 357 bp, Artificial Sequence; identical to SEQ ID NO: 5281
  Description of Artificial Sequence: Synthetic Heavy chain variable region nucleic acid sequence

SEQ ID NO: 5554 - protein, 119 aa, Artificial Sequence; identical to SEQ ID NO: 5282
  Description of Artificial Sequence: Synthetic Heavy chain variable region amino acid sequence

SEQ ID NO: 5555 - protein, 9 aa, Artificial Sequence
  Description of Artificial Sequence: Synthetic Heavy chain variable region CDR H1 amino acid sequence
FNIKDYYMH

SEQ ID NO: 5556 - DNA, 27 bp, Artificial Sequence
  Description of Artificial Sequence: Synthetic Heavy chain variable region CDR H1 nucleic acid sequence
ttcaacatcaaggactactatatgcac

SEQ ID NO: 5557 - protein, 17 aa, Artificial Sequence
  Description of Artificial Sequence: Synthetic Heavy chain variable region CDR H2 amino acid sequence
WIDLENANTIYDAKFQG

SEQ ID NO: 5558 - DNA, 51 bp, Artificial Sequence; identical to SEQ ID NO: 4662
  Description of Artificial Sequence: Synthetic Heavy chain variable region CDR H2 nucleic acid sequence

SEQ ID NO: 5559 - protein, 12 aa, Artificial Sequence
  Description of Artificial Sequence: Synthetic Heavy chain variable region CDR H3 amino acid sequence
ARDQYGRYFYDV

SEQ ID NO: 5560 - DNA, 36 bp, Artificial Sequence; identical to SEQ ID NO: 5288
  Description of Artificial Sequence: Synthetic Heavy chain variable region CDR H3 nucleic acid sequence

SEQ ID NO: 5561 - DNA, 336 bp, Artificial Sequence; identical to SEQ ID NO: 5529
  Description of Artificial Sequence: Synthetic Light chain variable region nucleic acid sequence

SEQ ID NO: 5562 - protein, 112 aa, Artificial Sequence; identical to SEQ ID NO: 5530
  Description of Artificial Sequence: Synthetic Light chain variable region amino acid sequence

SEQ ID NO: 5563 - protein, 17 aa, Artificial Sequence
  Description of Artificial Sequence: Synthetic Light chain variable region CDR L1 amino acid sequence
KSSQSLLNARTGKNYLA

SEQ ID NO: 5564 - DNA, 51 bp, Artificial Sequence; identical to SEQ ID NO: 4540
  Description of Artificial Sequence: Synthetic Light chain variable region CDR L1 nucleic acid sequence

SEQ ID NO: 5565 - protein, 7 aa, Artificial Sequence
  Description of Artificial Sequence: Synthetic Light chain variable region CDR L2 amino acid sequence
WASTRES

SEQ ID NO: 5566 - DNA, 21 bp, Artificial Sequence
  Description of Artificial Sequence: Synthetic Light chain variable region CDR L2 nucleic acid sequence
tgggcatctacccgggaatcc

SEQ ID NO: 5567 - protein, 8 aa, Artificial Sequence
  Description of Artificial Sequence: Synthetic Light chain variable region CDR L3 amino acid sequence
KQSYSIRT

SEQ ID NO: 5568 - DNA, 24 bp, Artificial Sequence
  Description of Artificial Sequence: Synthetic Light chain variable region CDR L3 nucleic acid sequence
aagcaatcttattctatcagaact

SEQ ID NO: 5569 - DNA, 357 bp, Artificial Sequence; identical to SEQ ID NO: 5441
  Description of Artificial Sequence: Synthetic Heavy chain variable region nucleic acid sequence

SEQ ID NO: 5570 - protein, 119 aa, Artificial Sequence; identical to SEQ ID NO: 5442
  Description of Artificial Sequence: Synthetic Heavy chain variable region amino acid sequence

SEQ ID NO: 5571 - protein, 9 aa, Artificial Sequence
  Description of Artificial Sequence: Synthetic Heavy chain variable region CDR H1 amino acid sequence
FNIKDYYMH

SEQ ID NO: 5572 - DNA, 27 bp, Artificial Sequence
  Description of Artificial Sequence: Synthetic Heavy chain variable region CDR H1 nucleic acid sequence
ttcaacatcaaggactactatatgcac

SEQ ID NO: 5573 - protein, 17 aa, Artificial Sequence
  Description of Artificial Sequence: Synthetic Heavy chain variable region CDR H2 amino acid sequence
WIDLEEGNTIYDAKFQG

SEQ ID NO: 5574 - DNA, 51 bp, Artificial Sequence; identical to SEQ ID NO: 5222
  Description of Artificial Sequence: Synthetic Heavy chain variable region CDR H2 nucleic acid sequence

SEQ ID NO: 5575 - protein, 12 aa, Artificial Sequence
  Description of Artificial Sequence: Synthetic Heavy chain variable region CDR H3 amino acid sequence
ARDRYGAYFYDV

SEQ ID NO: 5576 - DNA, 36 bp, Artificial Sequence; identical to SEQ ID NO: 5256
  Description of Artificial Sequence: Synthetic Heavy chain variable region CDR H3 nucleic acid sequence

SEQ ID NO: 5577 - DNA, 336 bp, Artificial Sequence; identical to SEQ ID NO: 5529
  Description of Artificial Sequence: Synthetic Light chain variable region nucleic acid sequence

SEQ ID NO: 5578 - protein, 112 aa, Artificial Sequence; identical to SEQ ID NO: 5530
  Description of Artificial Sequence: Synthetic Light chain variable region amino acid sequence

SEQ ID NO: 5579 - protein, 17 aa, Artificial Sequence
  Description of Artificial Sequence: Synthetic Light chain variable region CDR L1 amino acid sequence
KSSQSLLNARTGKNYLA

SEQ ID NO: 5580 - DNA, 51 bp, Artificial Sequence; identical to SEQ ID NO: 4540
  Description of Artificial Sequence: Synthetic Light chain variable region CDR L1 nucleic acid sequence

SEQ ID NO: 5581 - protein, 7 aa, Artificial Sequence
  Description of Artificial Sequence: Synthetic Light chain variable region CDR L2 amino acid sequence
WASTRES

SEQ ID NO: 5582 - DNA, 21 bp, Artificial Sequence
  Description of Artificial Sequence: Synthetic Light chain variable region CDR L2 nucleic acid sequence
tgggcatctacccgggaatcc

SEQ ID NO: 5583 - protein, 8 aa, Artificial Sequence
  Description of Artificial Sequence: Synthetic Light chain variable region CDR L3 amino acid sequence
KQSYSIRT

SEQ ID NO: 5584 - DNA, 24 bp, Artificial Sequence
  Description of Artificial Sequence: Synthetic Light chain variable region CDR L3 nucleic acid sequence
aagcaatcttattctatcagaact

SEQ ID NO: 5585 - DNA, 357 bp, Artificial Sequence
  Description of Artificial Sequence: Synthetic Heavy chain variable region nucleic acid sequence
caggtgcagctggtgcagtctggggctgaggtgaagaagcctggggcctcagtgaaggtctcctgcaaggcttctggattcaacatcaaggactactatatgcactgggtgcgacaggctcctggacaaaggcttgagtggatgggatggatcgaccttgaagagggcaacacaatctatgacgctaagtttcagggcagggtcaccataaccagggacacgtccgccagcacagcctacatggagctgagcagcctgagatctgaagacacggcggtgtactactgcgcgagagatcagtacgggagatatttttacgacgtgtggggccaaggaaccctggtcaccgtctcctca

SEQ ID NO: 5586 - protein, 119 aa, Artificial Sequence
  Description of Artificial Sequence: Synthetic Heavy chain variable region amino acid sequence
QVQLVQSGAEVKKPGASVKVSCKASGFNIKDYYMHWVRQAPGQRLEWMGWIDLEEGNTIYDAKFQGRVTITRDTSASTAYMELSSLRSEDTAVYYCARDQYGRYFYDVWGQGTLVTVSS

SEQ ID NO: 5587 - protein, 9 aa, Artificial Sequence
  Description of Artificial Sequence: Synthetic Heavy chain variable region CDR H1 amino acid sequence
FNIKDYYMH

SEQ ID NO: 5588 - DNA, 27 bp, Artificial Sequence
  Description of Artificial Sequence: Synthetic Heavy chain variable region CDR H1 nucleic acid sequence
ttcaacatcaaggactactatatgcac

SEQ ID NO: 5589 - protein, 17 aa, Artificial Sequence
  Description of Artificial Sequence: Synthetic Heavy chain variable region CDR H2 amino acid sequence
WIDLEEGNTIYDAKFQG

SEQ ID NO: 5590 - DNA, 51 bp, Artificial Sequence; identical to SEQ ID NO: 5222
  Description of Artificial Sequence: Synthetic Heavy chain variable region CDR H2 nucleic acid sequence

SEQ ID NO: 5591 - protein, 12 aa, Artificial Sequence
  Description of Artificial Sequence: Synthetic Heavy chain variable region CDR H3 amino acid sequence
ARDQYGRYFYDV

SEQ ID NO: 5592 - DNA, 36 bp, Artificial Sequence; identical to SEQ ID NO: 5288
  Description of Artificial Sequence: Synthetic Heavy chain variable region CDR H3 nucleic acid sequence

SEQ ID NO: 5593 - DNA, 336 bp, Artificial Sequence; identical to SEQ ID NO: 5529
  Description of Artificial Sequence: Synthetic Light chain variable region nucleic acid sequence

SEQ ID NO: 5594 - protein, 112 aa, Artificial Sequence; identical to SEQ ID NO: 5530
  Description of Artificial Sequence: Synthetic Light chain variable region amino acid sequence

SEQ ID NO: 5595 - protein, 17 aa, Artificial Sequence
  Description of Artificial Sequence: Synthetic Light chain variable region CDR L1 amino acid sequence
KSSQSLLNARTGKNYLA

SEQ ID NO: 5596 - DNA, 51 bp, Artificial Sequence; identical to SEQ ID NO: 4540
  Description of Artificial Sequence: Synthetic Light chain variable region CDR L1 nucleic acid sequence

SEQ ID NO: 5597 - protein, 7 aa, Artificial Sequence
  Description of Artificial Sequence: Synthetic Light chain variable region CDR L2 amino acid sequence
WASTRES

SEQ ID NO: 5598 - DNA, 21 bp, Artificial Sequence
  Description of Artificial Sequence: Synthetic Light chain variable region CDR L2 nucleic acid sequence
tgggcatctacccgggaatcc

SEQ ID NO: 5599 - protein, 8 aa, Artificial Sequence
  Description of Artificial Sequence: Synthetic Light chain variable region CDR L3 amino acid sequence
KQSYSIRT

SEQ ID NO: 5600 - DNA, 24 bp, Artificial Sequence
  Description of Artificial Sequence: Synthetic Light chain variable region CDR L3 nucleic acid sequence
aagcaatcttattctatcagaact

SEQ ID NO: 5601 - DNA, 357 bp, Artificial Sequence; identical to SEQ ID NO: 5313
  Description of Artificial Sequence: Synthetic Heavy chain variable region nucleic acid sequence

SEQ ID NO: 5602 - protein, 119 aa, Artificial Sequence; identical to SEQ ID NO: 5314
  Description of Artificial Sequence: Synthetic Heavy chain variable region amino acid sequence

SEQ ID NO: 5603 - protein, 9 aa, Artificial Sequence
  Description of Artificial Sequence: Synthetic Heavy chain variable region CDR H1 amino acid sequence
FNIKDYYMH

SEQ ID NO: 5604 - DNA, 27 bp, Artificial Sequence
  Description of Artificial Sequence: Synthetic Heavy chain variable region CDR H1 nucleic acid sequence
ttcaacatcaaggactactatatgcac

SEQ ID NO: 5605 - protein, 17 aa, Artificial Sequence
  Description of Artificial Sequence: Synthetic Heavy chain variable region CDR H2 amino acid sequence
WIDLENANTIYDAKFQG

SEQ ID NO: 5606 - DNA, 51 bp, Artificial Sequence; identical to SEQ ID NO: 4662
  Description of Artificial Sequence: Synthetic Heavy chain variable region CDR H2 nucleic acid sequence

SEQ ID NO: 5607 - protein, 12 aa, Artificial Sequence
  Description of Artificial Sequence: Synthetic Heavy chain variable region CDR H3 amino acid sequence
ARDVYGRYFYDL

SEQ ID NO: 5608 - DNA, 36 bp, Artificial Sequence; identical to SEQ ID NO: 5320
  Description of Artificial Sequence: Synthetic Heavy chain variable region CDR H3 nucleic acid sequence

SEQ ID NO: 5609 - DNA, 336 bp, Artificial Sequence; identical to SEQ ID NO: 5529
  Description of Artificial Sequence: Synthetic Light chain variable region nucleic acid sequence

SEQ ID NO: 5610 - protein, 112 aa, Artificial Sequence; identical to SEQ ID NO: 5530
  Description of Artificial Sequence: Synthetic Light chain variable region amino acid sequence

SEQ ID NO: 5611 - protein, 17 aa, Artificial Sequence
  Description of Artificial Sequence: Synthetic Light chain variable region CDR L1 amino acid sequence
KSSQSLLNARTGKNYLA

SEQ ID NO: 5612 - DNA, 51 bp, Artificial Sequence; identical to SEQ ID NO: 4540
  Description of Artificial Sequence: Synthetic Light chain variable region CDR L1 nucleic acid sequence

SEQ ID NO: 5613 - protein, 7 aa, Artificial Sequence
  Description of Artificial Sequence: Synthetic Light chain variable region CDR L2 amino acid sequence
WASTRES

SEQ ID NO: 5614 - DNA, 21 bp, Artificial Sequence
  Description of Artificial Sequence: Synthetic Light chain variable region CDR L2 nucleic acid sequence
tgggcatctacccgggaatcc

SEQ ID NO: 5615 - protein, 8 aa, Artificial Sequence
  Description of Artificial Sequence: Synthetic Light chain variable region CDR L3 amino acid sequence
KQSYSIRT

SEQ ID NO: 5616 - DNA, 24 bp, Artificial Sequence
  Description of Artificial Sequence: Synthetic Light chain variable region CDR L3 nucleic acid sequence
aagcaatcttattctatcagaact

SEQ ID NO: 5617 - DNA, 357 bp, Artificial Sequence; identical to SEQ ID NO: 5329
  Description of Artificial Sequence: Synthetic Heavy chain variable region nucleic acid sequence

SEQ ID NO: 5618 - protein, 119 aa, Artificial Sequence; identical to SEQ ID NO: 5330
  Description of Artificial Sequence: Synthetic Heavy chain variable region amino acid sequence

SEQ ID NO: 5619 - protein, 9 aa, Artificial Sequence
  Description of Artificial Sequence: Synthetic Heavy chain variable region CDR H1 amino acid sequence
FNIKDYYMH

SEQ ID NO: 5620 - DNA, 27 bp, Artificial Sequence
  Description of Artificial Sequence: Synthetic Heavy chain variable region CDR H1 nucleic acid sequence
ttcaacatcaaggactactatatgcac

SEQ ID NO: 5621 - protein, 17 aa, Artificial Sequence
  Description of Artificial Sequence: Synthetic Heavy chain variable region CDR H2 amino acid sequence
WIDLENANTIYDAKFQG

SEQ ID NO: 5622 - DNA, 51 bp, Artificial Sequence; identical to SEQ ID NO: 4662
  Description of Artificial Sequence: Synthetic Heavy chain variable region CDR H2 nucleic acid sequence

SEQ ID NO: 5623 - protein, 12 aa, Artificial Sequence
  Description of Artificial Sequence: Synthetic Heavy chain variable region CDR H3 amino acid sequence
ARDAYGGYFYDV

SEQ ID NO: 5624 - DNA, 36 bp, Artificial Sequence; identical to SEQ ID NO: 5336
  Description of Artificial Sequence: Synthetic Heavy chain variable region CDR H3 nucleic acid sequence

SEQ ID NO: 5625 - DNA, 336 bp, Artificial Sequence; identical to SEQ ID NO: 5529
  Description of Artificial Sequence: Synthetic Light chain variable region nucleic acid sequence

SEQ ID NO: 5626 - protein, 112 aa, Artificial Sequence; identical to SEQ ID NO: 5530
  Description of Artificial Sequence: Synthetic Light chain variable region amino acid sequence

SEQ ID NO: 5627 - protein, 17 aa, Artificial Sequence
  Description of Artificial Sequence: Synthetic Light chain variable region CDR L1 amino acid sequence
KSSQSLLNARTGKNYLA

SEQ ID NO: 5628 - DNA, 51 bp, Artificial Sequence; identical to SEQ ID NO: 4540
  Description of Artificial Sequence: Synthetic Light chain variable region CDR L1 nucleic acid sequence

SEQ ID NO: 5629 - protein, 7 aa, Artificial Sequence
  Description of Artificial Sequence: Synthetic Light chain variable region CDR L2 amino acid sequence
WASTRES

SEQ ID NO: 5630 - DNA, 21 bp, Artificial Sequence
  Description of Artificial Sequence: Synthetic Light chain variable region CDR L2 nucleic acid sequence
tgggcatctacccgggaatcc

SEQ ID NO: 5631 - protein, 8 aa, Artificial Sequence
  Description of Artificial Sequence: Synthetic Light chain variable region CDR L3 amino acid sequence
KQSYSIRT

SEQ ID NO: 5632 - DNA, 24 bp, Artificial Sequence
  Description of Artificial Sequence: Synthetic Light chain variable region CDR L3 nucleic acid sequence
aagcaatcttattctatcagaact

SEQ ID NO: 5633 - DNA, 357 bp, Artificial Sequence; identical to SEQ ID NO: 5345
  Description of Artificial Sequence: Synthetic Heavy chain variable region nucleic acid sequence

SEQ ID NO: 5634 - protein, 119 aa, Artificial Sequence; identical to SEQ ID NO: 5346
  Description of Artificial Sequence: Synthetic Heavy chain variable region amino acid sequence

SEQ ID NO: 5635 - protein, 9 aa, Artificial Sequence
  Description of Artificial Sequence: Synthetic Heavy chain variable region CDR H1 amino acid sequence
FNIKDYYMH

SEQ ID NO: 5636 - DNA, 27 bp, Artificial Sequence
  Description of Artificial Sequence: Synthetic Heavy chain variable region CDR H1 nucleic acid sequence
ttcaacatcaaggactactatatgcac

SEQ ID NO: 5637 - protein, 17 aa, Artificial Sequence
  Description of Artificial Sequence: Synthetic Heavy chain variable region CDR H2 amino acid sequence
WIDLENANTIYDAKFQG

SEQ ID NO: 5638 - DNA, 51 bp, Artificial Sequence; identical to SEQ ID NO: 4662
  Description of Artificial Sequence: Synthetic Heavy chain variable region CDR H2 nucleic acid sequence

SEQ ID NO: 5639 - protein, 12 aa, Artificial Sequence
  Description of Artificial Sequence: Synthetic Heavy chain variable region CDR H3 amino acid sequence
ARDNYGGYFYDV

SEQ ID NO: 5640 - DNA, 36 bp, Artificial Sequence; identical to SEQ ID NO: 5352
  Description of Artificial Sequence: Synthetic Heavy chain variable region CDR H3 nucleic acid sequence

SEQ ID NO: 5641 - DNA, 336 bp, Artificial Sequence; identical to SEQ ID NO: 5529
  Description of Artificial Sequence: Synthetic Light chain variable region nucleic acid sequence

SEQ ID NO: 5642 - protein, 112 aa, Artificial Sequence; identical to SEQ ID NO: 5530
  Description of Artificial Sequence: Synthetic Light chain variable region amino acid sequence

SEQ ID NO: 5643 - protein, 17 aa, Artificial Sequence
  Description of Artificial Sequence: Synthetic Light chain variable region CDR L1 amino acid sequence
KSSQSLLNARTGKNYLA

SEQ ID NO: 5644 - DNA, 51 bp, Artificial Sequence; identical to SEQ ID NO: 4540
  Description of Artificial Sequence: Synthetic Light chain variable region CDR L1 nucleic acid sequence

SEQ ID NO: 5645 - protein, 7 aa, Artificial Sequence
  Description of Artificial Sequence: Synthetic Light chain variable region CDR L2 amino acid sequence
WASTRES

SEQ ID NO: 5646 - DNA, 21 bp, Artificial Sequence
  Description of Artificial Sequence: Synthetic Light chain variable region CDR L2 nucleic acid sequence
tgggcatctacccgggaatcc

SEQ ID NO: 5647 - protein, 8 aa, Artificial Sequence
  Description of Artificial Sequence: Synthetic Light chain variable region CDR L3 amino acid sequence
KQSYSIRT

SEQ ID NO: 5648 - DNA, 24 bp, Artificial Sequence
  Description of Artificial Sequence: Synthetic Light chain variable region CDR L3 nucleic acid sequence
aagcaatcttattctatcagaact

SEQ ID NO: 5649 - DNA, 357 bp, Artificial Sequence; identical to SEQ ID NO: 5233
  Description of Artificial Sequence: Synthetic Heavy chain variable region nucleic acid sequence

SEQ ID NO: 5650 - protein, 119 aa, Artificial Sequence; identical to SEQ ID NO: 5234
  Description of Artificial Sequence: Synthetic Heavy chain variable region amino acid sequence

SEQ ID NO: 5651 - protein, 9 aa, Artificial Sequence
  Description of Artificial Sequence: Synthetic Heavy chain variable region CDR H1 amino acid sequence
FNIKDYYMH

SEQ ID NO: 5652 - DNA, 27 bp, Artificial Sequence
  Description of Artificial Sequence: Synthetic Heavy chain variable region CDR H1 nucleic acid sequence
ttcaacatcaaggactactatatgcac

SEQ ID NO: 5653 - protein, 17 aa, Artificial Sequence
  Description of Artificial Sequence: Synthetic Heavy chain variable region CDR H2 amino acid sequence
WIDLEEGNTIYDAKFQG

SEQ ID NO: 5654 - DNA, 51 bp, Artificial Sequence; identical to SEQ ID NO: 5222
  Description of Artificial Sequence: Synthetic Heavy chain variable region CDR H2 nucleic acid sequence

SEQ ID NO: 5655 - protein, 12 aa, Artificial Sequence
  Description of Artificial Sequence: Synthetic Heavy chain variable region CDR H3 amino acid sequence
GRDAYGRYFYDV

SEQ ID NO: 5656 - DNA, 36 bp, Artificial Sequence; identical to SEQ ID NO: 5208
  Description of Artificial Sequence: Synthetic Heavy chain variable region CDR H3 nucleic acid sequence

SEQ ID NO: 5657 - DNA, 336 bp, Artificial Sequence
  Description of Artificial Sequence: Synthetic Light chain variable region nucleic acid sequence
gacatcgtgatgacccagtctccagactccctggctgtgtctctgggcgagagggccaccatcaactgcaagtccagccagagtcttttagaaagcagaaccggaaagaactacttagcttggtaccagcagaaaccaggacagcctcctaagctgctcatttactgggcatctacccgggaatccggggtccctgaccgattcagtggcagcgggtctgggacagacttcactctcactatcagtagcctgcaggctgaagatgtggcagtttattactgtaagcaatcttattctctgagaactttcggcggagggaccaaggtcgagatcaaa

SEQ ID NO: 5658 - protein, 112 aa, Artificial Sequence
  Description of Artificial Sequence: Synthetic Light chain variable region amino acid sequence
DIVMTQSPDSLAVSLGERATINCKSSQSLLESRTGKNYLAWYQQKPGQPPKLLIYWASTRESGVPDRFSGSGSGTDFTLTISSLQAEDVAVYYCKQSYSLRTFGGGTKVEIK

SEQ ID NO: 5659 - protein, 17 aa, Artificial Sequence
  Description of Artificial Sequence: Synthetic Light chain variable region CDR L1 amino acid sequence
KSSQSLLESRTGKNYLA

SEQ ID NO: 5660 - DNA, 51 bp, Artificial Sequence; identical to SEQ ID NO: 4300
  Description of Artificial Sequence: Synthetic Light chain variable region CDR L1 nucleic acid sequence

SEQ ID NO: 5661 - protein, 7 aa, Artificial Sequence
  Description of Artificial Sequence: Synthetic Light chain variable region CDR L2 amino acid sequence
WASTRES

SEQ ID NO: 5662 - DNA, 21 bp, Artificial Sequence
  Description of Artificial Sequence: Synthetic Light chain variable region CDR L2 nucleic acid sequence
tgggcatctacccgggaatcc

SEQ ID NO: 5663 - protein, 8 aa, Artificial Sequence
  Description of Artificial Sequence: Synthetic Light chain variable region CDR L3 amino acid sequence
KQSYSLRT

SEQ ID NO: 5664 - DNA, 24 bp, Artificial Sequence
  Description of Artificial Sequence: Synthetic Light chain variable region CDR L3 nucleic acid sequence
aagcaatcttattctctgagaact

SEQ ID NO: 5665 - DNA, 357 bp, Artificial Sequence; identical to SEQ ID NO: 5297
  Description of Artificial Sequence: Synthetic Heavy chain variable region nucleic acid sequence

SEQ ID NO: 5666 - protein, 119 aa, Artificial Sequence; identical to SEQ ID NO: 5298
  Description of Artificial Sequence: Synthetic Heavy chain variable region amino acid sequence

SEQ ID NO: 5667 - protein, 9 aa, Artificial Sequence
  Description of Artificial Sequence: Synthetic Heavy chain variable region CDR H1 amino acid sequence
FNIKDYYMH

SEQ ID NO: 5668 - DNA, 27 bp, Artificial Sequence
  Description of Artificial Sequence: Synthetic Heavy chain variable region CDR H1 nucleic acid sequence
ttcaacatcaaggactactatatgcac

SEQ ID NO: 5669 - protein, 17 aa, Artificial Sequence
  Description of Artificial Sequence: Synthetic Heavy chain variable region CDR H2 amino acid sequence
WIDLEEGNTIYDAKFQG

SEQ ID NO: 5670 - DNA, 51 bp, Artificial Sequence; identical to SEQ ID NO: 5222
  Description of Artificial Sequence: Synthetic Heavy chain variable region CDR H2 nucleic acid sequence

SEQ ID NO: 5671 - protein, 12 aa, Artificial Sequence
  Description of Artificial Sequence: Synthetic Heavy chain variable region CDR H3 amino acid sequence
ARDVLGRYFYDV

SEQ ID NO: 5672 - DNA, 36 bp, Artificial Sequence; identical to SEQ ID NO: 5272
  Description of Artificial Sequence: Synthetic Heavy chain variable region CDR H3 nucleic acid sequence

SEQ ID NO: 5673 - DNA, 336 bp, Artificial Sequence; identical to SEQ ID NO: 5657
  Description of Artificial Sequence: Synthetic Light chain variable region nucleic acid sequence

SEQ ID NO: 5674 - protein, 112 aa, Artificial Sequence; identical to SEQ ID NO: 5658
  Description of Artificial Sequence: Synthetic Light chain variable region amino acid sequence

SEQ ID NO: 5675 - protein, 17 aa, Artificial Sequence
  Description of Artificial Sequence: Synthetic Light chain variable region CDR L1 amino acid sequence
KSSQSLLESRTGKNYLA

SEQ ID NO: 5676 - DNA, 51 bp, Artificial Sequence; identical to SEQ ID NO: 4300
  Description of Artificial Sequence: Synthetic Light chain variable region CDR L1 nucleic acid sequence

SEQ ID NO: 5677 - protein, 7 aa, Artificial Sequence
  Description of Artificial Sequence: Synthetic Light chain variable region CDR L2 amino acid sequence
WASTRES

SEQ ID NO: 5678 - DNA, 21 bp, Artificial Sequence
  Description of Artificial Sequence: Synthetic Light chain variable region CDR L2 nucleic acid sequence
tgggcatctacccgggaatcc

SEQ ID NO: 5679 - protein, 8 aa, Artificial Sequence
  Description of Artificial Sequence: Synthetic Light chain variable region CDR L3 amino acid sequence
KQSYSLRT

SEQ ID NO: 5680 - DNA, 24 bp, Artificial Sequence
  Description of Artificial Sequence: Synthetic Light chain variable region CDR L3 nucleic acid sequence
aagcaatcttattctctgagaact

SEQ ID NO: 5681 - DNA, 357 bp, Artificial Sequence; identical to SEQ ID NO: 5345
  Description of Artificial Sequence: Synthetic Heavy chain variable region nucleic acid sequence

SEQ ID NO: 5682 - protein, 119 aa, Artificial Sequence; identical to SEQ ID NO: 5346
  Description of Artificial Sequence: Synthetic Heavy chain variable region amino acid sequence

SEQ ID NO: 5683 - protein, 9 aa, Artificial Sequence
  Description of Artificial Sequence: Synthetic Heavy chain variable region CDR H1 amino acid sequence
FNIKDYYMH

SEQ ID NO: 5684 - DNA, 27 bp, Artificial Sequence
  Description of Artificial Sequence: Synthetic Heavy chain variable region CDR H1 nucleic acid sequence
ttcaacatcaaggactactatatgcac

SEQ ID NO: 5685 - protein, 17 aa, Artificial Sequence
  Description of Artificial Sequence: Synthetic Heavy chain variable region CDR H2 amino acid sequence
WIDLENANTIYDAKFQG

SEQ ID NO: 5686 - DNA, 51 bp, Artificial Sequence; identical to SEQ ID NO: 4662
  Description of Artificial Sequence: Synthetic Heavy chain variable region CDR H2 nucleic acid sequence

SEQ ID NO: 5687 - protein, 12 aa, Artificial Sequence
  Description of Artificial Sequence: Synthetic Heavy chain variable region CDR H3 amino acid sequence
ARDNYGGYFYDV

SEQ ID NO: 5688 - DNA, 36 bp, Artificial Sequence; identical to SEQ ID NO: 5352
  Description of Artificial Sequence: Synthetic Heavy chain variable region CDR H3 nucleic acid sequence

SEQ ID NO: 5689 - DNA, 336 bp, Artificial Sequence; identical to SEQ ID NO: 5657
  Description of Artificial Sequence: Synthetic Light chain variable region nucleic acid sequence

SEQ ID NO: 5690 - protein, 112 aa, Artificial Sequence; identical to SEQ ID NO: 5658
  Description of Artificial Sequence: Synthetic Light chain variable region amino acid sequence

SEQ ID NO: 5691 - protein, 17 aa, Artificial Sequence
  Description of Artificial Sequence: Synthetic Light chain variable region CDR L1 amino acid sequence
KSSQSLLESRTGKNYLA

SEQ ID NO: 5692 - DNA, 51 bp, Artificial Sequence; identical to SEQ ID NO: 4300
  Description of Artificial Sequence: Synthetic Light chain variable region CDR L1 nucleic acid sequence

SEQ ID NO: 5693 - protein, 7 aa, Artificial Sequence
  Description of Artificial Sequence: Synthetic Light chain variable region CDR L2 amino acid sequence
WASTRES

SEQ ID NO: 5694 - DNA, 21 bp, Artificial Sequence
  Description of Artificial Sequence: Synthetic Light chain variable region CDR L2 nucleic acid sequence
tgggcatctacccgggaatcc

SEQ ID NO: 5695 - protein, 8 aa, Artificial Sequence
  Description of Artificial Sequence: Synthetic Light chain variable region CDR L3 amino acid sequence
KQSYSLRT

SEQ ID NO: 5696 - DNA, 24 bp, Artificial Sequence
  Description of Artificial Sequence: Synthetic Light chain variable region CDR L3 nucleic acid sequence
aagcaatcttattctctgagaact

SEQ ID NO: 5697 - DNA, 351 bp, Artificial Sequence
  Description of Artificial Sequence: Synthetic Heavy chain variable region nucleic acid sequence
gaagtgaagctgcagcagtctggggctgagcttgtgaggccaggggccttagtcaagttgtcctgcaaagcttctgacttcaacattaaagactactatatgcactgggtgaagcagaggcctgaacagggcctggagtggattggatggattgatcctgagaatggtaatactatatatgacccgaagttccagggcaaggccagtataacagcagacacatcctccaacacagcctacctgcagctcagcagcctgacatctgaggacactgccgtctattactgtggtagggatggtaactacttttttgactactggggccaaggcaccacggtcaccgtctcctca

SEQ ID NO: 5698 - protein, 117 aa, Artificial Sequence
  Description of Artificial Sequence: Synthetic Heavy chain variable region amino acid sequence
EVKLQQSGAELVRPGALVKLSCKASDFNIKDYYMHWVKQRPEQGLEWIGWIDPENGNTIYDPKFQGKASITADTSSNTAYLQLSSLTSEDTAVYYCGRDGNYFFDYWGQGTTVTVSS

SEQ ID NO: 5699 - protein, 9 aa, Artificial Sequence
  Description of Artificial Sequence: Synthetic Heavy chain variable region CDR H1 amino acid sequence
FNIKDYYMH

SEQ ID NO: 5700 - DNA, 27 bp, Artificial Sequence
  Description of Artificial Sequence: Synthetic Heavy chain variable region CDR H1 nucleic acid sequence
ttcaacattaaagactactatatgcac

SEQ ID NO: 5701 - protein, 17 aa, Artificial Sequence
  Description of Artificial Sequence: Synthetic Heavy chain variable region CDR H2 amino acid sequence
WIDPENGNTIYDPKFQG

SEQ ID NO: 5702 - DNA, 51 bp, Artificial Sequence
  Description of Artificial Sequence: Synthetic Heavy chain variable region CDR H2 nucleic acid sequence
tggattgatcctgagaatggtaatactatatatgacccgaagttccagggc

SEQ ID NO: 5703 - protein, 10 aa, Artificial Sequence
  Description of Artificial Sequence: Synthetic Heavy chain variable region CDR H3 amino acid sequence
GRDGNYFFDY

SEQ ID NO: 5704 - DNA, 30 bp, Artificial Sequence
  Description of Artificial Sequence: Synthetic Heavy chain variable region CDR H3 nucleic acid sequence
ggtagggatggtaactacttttttgactac

SEQ ID NO: 5705 - DNA, 336 bp, Artificial Sequence
  Description of Artificial Sequence: Synthetic Light chain variable region nucleic acid sequence
gacatccagctgactcagtctccatcctccctggctgtgtcagcaggagagaaggtcactatgagctgcaaatccagtcagagtctgctcaacagtagaacccgaaagaactacttggcttggtaccagcagaaaccagggcagtctcctaaactgctgatctactgggcatccactagggaatctggagtccctgatcgcttcacaggcagtggatctgggacagatttcactctcaccatcagcagtgtgcaggctgaagacctggcagtttattactgcaagcaatcttataatcttcggacgttcggtggagggaccaagctggagctgaaa

SEQ ID NO: 5706 - protein, 112 aa, Artificial Sequence; identical to SEQ ID NO: 2810
  Description of Artificial Sequence: Synthetic Light chain variable region amino acid sequence

SEQ ID NO: 5707 - protein, 17 aa, Artificial Sequence
  Description of Artificial Sequence: Synthetic Light chain variable region CDR L1 amino acid sequence
KSSQSLLNSRTRKNYLA

SEQ ID NO: 5708 - DNA, 51 bp, Artificial Sequence; identical to SEQ ID NO: 2764
  Description of Artificial Sequence: Synthetic Light chain variable region CDR L1 nucleic acid sequence

SEQ ID NO: 5709 - protein, 7 aa, Artificial Sequence
  Description of Artificial Sequence: Synthetic Light chain variable region CDR L2 amino acid sequence
WASTRES

SEQ ID NO: 5710 - DNA, 21 bp, Artificial Sequence
  Description of Artificial Sequence: Synthetic Light chain variable region CDR L2 nucleic acid sequence
tgggcatccactagggaatct

SEQ ID NO: 5711 - protein, 8 aa, Artificial Sequence
  Description of Artificial Sequence: Synthetic Light chain variable region CDR L3 amino acid sequence
KQSYNLRT

SEQ ID NO: 5712 - DNA, 24 bp, Artificial Sequence
  Description of Artificial Sequence: Synthetic Light chain variable region CDR L3 nucleic acid sequence
aagcaatcttataatcttcggacg

SEQ ID NO: 5713 - DNA, 351 bp, Artificial Sequence
  Description of Artificial Sequence: Synthetic Heavy chain variable region nucleic acid sequence
gaagtgcagctgcagcagtcaggacctgagctggtgaagcctggggcttcagtgaggatctcctgcaaggcttctgactacaccttcacaagctactatattcactgggtgaagcagaggcctggacagggacttgagtggattggatggatttatcctggaaatgttaatactaagtacaatgagaatttcaaggacaaggccacactgactgcagacaaatcctccagcacagcctacatgcacctcagcagcctgacctctgaggactctgcggtctatttctgtgcaagagatgatggttactactttgactactggggccaaggcaccacggtcaccgtctcctca

SEQ ID NO: 5714 - protein, 117 aa, Artificial Sequence
  Description of Artificial Sequence: Synthetic Heavy chain variable region amino acid sequence
EVQLQQSGPELVKPGASVRISCKASDYTFTSYYIHWVKQRPGQGLEWIGWIYPGNVNTKYNENFKDKATLTADKSSSTAYMHLSSLTSEDSAVYFCARDDGYYFDYWGQGTTVTVSS

SEQ ID NO: 5715 - protein, 9 aa, Artificial Sequence
  Description of Artificial Sequence: Synthetic Heavy chain variable region CDR H1 amino acid sequence
YTFTSYYIH

SEQ ID NO: 5716 - DNA, 27 bp, Artificial Sequence
  Description of Artificial Sequence: Synthetic Heavy chain variable region CDR H1 nucleic acid sequence
tacaccttcacaagctactatattcac

SEQ ID NO: 5717 - protein, 17 aa, Artificial Sequence
  Description of Artificial Sequence: Synthetic Heavy chain variable region CDR H2 amino acid sequence
WIYPGNVNTKYNENFKD

SEQ ID NO: 5718 - DNA, 51 bp, Artificial Sequence
  Description of Artificial Sequence: Synthetic Heavy chain variable region CDR H2 nucleic acid sequence
tggatttatcctggaaatgttaatactaagtacaatgagaatttcaaggac

SEQ ID NO: 5719 - protein, 10 aa, Artificial Sequence
  Description of Artificial Sequence: Synthetic Heavy chain variable region CDR H3 amino acid sequence
ARDDGYYFDY

SEQ ID NO: 5720 - DNA, 30 bp, Artificial Sequence
  Description of Artificial Sequence: Synthetic Heavy chain variable region CDR H3 nucleic acid sequence
gcaagagatgatggttactactttgactac

SEQ ID NO: 5721 - DNA, 336 bp, Artificial Sequence
  Description of Artificial Sequence: Synthetic Light chain variable region nucleic acid sequence
gacatccagctgacccagtctccatcctccctggctgtgtcagcaggagagaaggtcactatgagctgcaaatccagtcagagtctgctcaacagtagaacccgaaagaactacttggcttggtaccagcagaaaccagggcagtctcctaaactgctgatctactgggcatccactagggaatctggggtccctgatcgcttcacaggcagtggatctgggacagatttcactctcaccatcagcagtgtgcaggctgaagacctggcagtttattactgcaagcaatcttataatcttcggacgttcggtggaggcacaaagctggaaatcaaa

SEQ ID NO: 5722 - protein, 112 aa, Artificial Sequence; identical to SEQ ID NO: 2794
  Description of Artificial Sequence: Synthetic Light chain variable region amino acid sequence

SEQ ID NO: 5723 - protein, 17 aa, Artificial Sequence
  Description of Artificial Sequence: Synthetic Light chain variable region CDR L1 amino acid sequence
KSSQSLLNSRTRKNYLA

SEQ ID NO: 5724 - DNA, 51 bp, Artificial Sequence; identical to SEQ ID NO: 2764
  Description of Artificial Sequence: Synthetic Light chain variable region CDR L1 nucleic acid sequence

SEQ ID NO: 5725 - protein, 7 aa, Artificial Sequence
  Description of Artificial Sequence: Synthetic Light chain variable region CDR L2 amino acid sequence
WASTRES

SEQ ID NO: 5726 - DNA, 21 bp, Artificial Sequence
  Description of Artificial Sequence: Synthetic Light chain variable region CDR L2 nucleic acid sequence
tgggcatccactagggaatct

SEQ ID NO: 5727 - protein, 8 aa, Artificial Sequence
  Description of Artificial Sequence: Synthetic Light chain variable region CDR L3 amino acid sequence
KQSYNLRT

SEQ ID NO: 5728 - DNA, 24 bp, Artificial Sequence
  Description of Artificial Sequence: Synthetic Light chain variable region CDR L3 nucleic acid sequence
aagcaatcttataatcttcggacg

SEQ ID NO: 5729 - DNA, 357 bp, Artificial Sequence
  Description of Artificial Sequence: Synthetic Heavy chain variable region nucleic acid sequence
caagtcaagctggagcagtctggacctgagctggtgaagcctggggcttcagtgaagatgtcctgcaaggcttctggctacaccttcacaaactactatatacactgggtgaagcagaggcctggacagggacttgagtggattggatggatttatcctgaagatggtaatactaaatacaatgagaaattcaagggcaagaccacactgactgcagacaaatcctccagcacagcctacatgttgctcagcagcctgacctctgaggactctgcgatctatttctgtgcaaggaataacggtagtagctatgctatggactactggggccaaggcaccacggtcaccgtctcctca

SEQ ID NO: 5730 - protein, 119 aa, Artificial Sequence
  Description of Artificial Sequence: Synthetic Heavy chain variable region amino acid sequence
QVKLEQSGPELVKPGASVKMSCKASGYTFTNYYIHWVKQRPGQGLEWIGWIYPEDGNTKYNEKFKGKTTLTADKSSSTAYMLLSSLTSEDSAIYFCARNNGSSYAMDYWGQGTTVTVSS

SEQ ID NO: 5731 - protein, 9 aa, Artificial Sequence
  Description of Artificial Sequence: Synthetic Heavy chain variable region CDR H1 amino acid sequence
YTFTNYYIH

SEQ ID NO: 5732 - DNA, 27 bp, Artificial Sequence
  Description of Artificial Sequence: Synthetic Heavy chain variable region CDR H1 nucleic acid sequence
tacaccttcacaaactactatatacac

SEQ ID NO: 5733 - protein, 17 aa, Artificial Sequence
  Description of Artificial Sequence: Synthetic Heavy chain variable region CDR H2 amino acid sequence
WIYPEDGNTKYNEKFKG

SEQ ID NO: 5734 - DNA, 51 bp, Artificial Sequence
  Description of Artificial Sequence: Synthetic Heavy chain variable region CDR H2 nucleic acid sequence
tggatttatcctgaagatggtaatactaaatacaatgagaaattcaagggc

SEQ ID NO: 5735 - protein, 12 aa, Artificial Sequence
  Description of Artificial Sequence: Synthetic Heavy chain variable region CDR H3 amino acid sequence
ARNNGSSYAMDY

SEQ ID NO: 5736 - DNA, 36 bp, Artificial Sequence
  Description of Artificial Sequence: Synthetic Heavy chain variable region CDR H3 nucleic acid sequence
gcaaggaataacggtagtagctatgctatggactac

SEQ ID NO: 5737 - DNA, 336 bp, Artificial Sequence
  Description of Artificial Sequence: Synthetic Light chain variable region nucleic acid sequence
ggcatccagctgactcagtctccatcctccctggctgtgtcagcaggagagaaggtcactatgagctgcaaatccagtcagagtctgctcaacagtagaacccgaaagaactacttggcttggtaccagcagaaaccagggcagtctcctaaactgctgatctactgggcatccactagggaatctggggtccctgatcgcttcacaggcagtggatctgggacagatttcactctcaccatcagcagtgtgcaggctgaagacctggcagtttattactgcaagcagtcttataatcttcggacgttcggtggagggaccaagctggagctgaaa

SEQ ID NO: 5738 - protein, 112 aa, Artificial Sequence
  Description of Artificial Sequence: Synthetic Light chain variable region amino acid sequence
GIQLTQSPSSLAVSAGEKVTMSCKSSQSLLNSRTRKNYLAWYQQKPGQSPKLLIYWASTRESGVPDRFTGSGSGTDFTLTISSVQAEDLAVYYCKQSYNLRTFGGGTKLELK

SEQ ID NO: 5739 - protein, 17 aa, Artificial Sequence
  Description of Artificial Sequence: Synthetic Light chain variable region CDR L1 amino acid sequence
KSSQSLLNSRTRKNYLA

SEQ ID NO: 5740 - DNA, 51 bp, Artificial Sequence; identical to SEQ ID NO: 2764
  Description of Artificial Sequence: Synthetic Light chain variable region CDR L1 nucleic acid sequence

SEQ ID NO: 5741 - protein, 7 aa, Artificial Sequence
  Description of Artificial Sequence: Synthetic Light chain variable region CDR L2 amino acid sequence
WASTRES

SEQ ID NO: 5742 - DNA, 21 bp, Artificial Sequence
  Description of Artificial Sequence: Synthetic Light chain variable region CDR L2 nucleic acid sequence
tgggcatccactagggaatct

SEQ ID NO: 5743 - protein, 8 aa, Artificial Sequence
  Description of Artificial Sequence: Synthetic Light chain variable region CDR L3 amino acid sequence
KQSYNLRT

SEQ ID NO: 5744 - DNA, 24 bp, Artificial Sequence
  Description of Artificial Sequence: Synthetic Light chain variable region CDR L3 nucleic acid sequence
aagcagtcttataatcttcggacg

SEQ ID NO: 5745 - DNA, 351 bp, Artificial Sequence
  Description of Artificial Sequence: Synthetic Heavy chain variable region nucleic acid sequence
caagtacagctggagcagtcaggacctgagctggtgaagcctggggcttcagtgaggatatcctgcaaggcttctggctacaccttcacaagctactatatacactgggtgaggcagaggcctggtcagggacttgagtggattggatggatttttcctggaaatgttaatactaagtacaatgagaagttcaagggcaaggccacactgactgcagacaaatcctccagcacagcctacatgcagctcagcagcctgacctctgaggactctgcggtctatttctgtgcaagagatggtaactactcctttgcttactggggccaaggcaccacggtcaccgtctcctca

SEQ ID NO: 5746 - protein, 117 aa, Artificial Sequence
  Description of Artificial Sequence: Synthetic Heavy chain variable region amino acid sequence
QVQLEQSGPELVKPGASVRISCKASGYTFTSYYIHWVRQRPGQGLEWIGWIFPGNVNTKYNEKFKGKATLTADKSSSTAYMQLSSLTSEDSAVYFCARDGNYSFAYWGQGTTVTVSS

SEQ ID NO: 5747 - protein, 9 aa, Artificial Sequence
  Description of Artificial Sequence: Synthetic Heavy chain variable region CDR H1 amino acid sequence
YTFTSYYIH

SEQ ID NO: 5748 - DNA, 27 bp, Artificial Sequence
  Description of Artificial Sequence: Synthetic Heavy chain variable region CDR H1 nucleic acid sequence
tacaccttcacaagctactatatacac

SEQ ID NO: 5749 - protein, 17 aa, Artificial Sequence
  Description of Artificial Sequence: Synthetic Heavy chain variable region CDR H2 amino acid sequence
WIFPGNVNTKYNEKFKG

SEQ ID NO: 5750 - DNA, 51 bp, Artificial Sequence
  Description of Artificial Sequence: Synthetic Heavy chain variable region CDR H2 nucleic acid sequence
tggatttttcctggaaatgttaatactaagtacaatgagaagttcaagggc

SEQ ID NO: 5751 - protein, 10 aa, Artificial Sequence
  Description of Artificial Sequence: Synthetic Heavy chain variable region CDR H3 amino acid sequence
ARDGNYSFAY

SEQ ID NO: 5752 - DNA, 30 bp, Artificial Sequence
  Description of Artificial Sequence: Synthetic Heavy chain variable region CDR H3 nucleic acid sequence
gcaagagatggtaactactcctttgcttac

SEQ ID NO: 5753 - DNA, 336 bp, Artificial Sequence
  Description of Artificial Sequence: Synthetic Light chain variable region nucleic acid sequence
gacattcagctcactcagtctccatcctccctggctgtgtcagcaggagagaaggtcactatgagctgcaaatccagtcagagtctgctcaacagtagaacccgaaagaactacttggcttggtaccagcaaaaaccagggcagtctcctaaactgctgatctactgggcatccactagggaatctggggtccctgatcgcttcacaggcagtggatctgggacagatttcactctcaccatcagcagtgtgcaggctgaagacctggcagtttattactgcaagcaatcttataatcttcggacgttcggtggagggacaaagctggaaataaaa

SEQ ID NO: 5754 - protein, 112 aa, Artificial Sequence; identical to SEQ ID NO: 2794
  Description of Artificial Sequence: Synthetic Light chain variable region amino acid sequence

SEQ ID NO: 5755 - protein, 17 aa, Artificial Sequence
  Description of Artificial Sequence: Synthetic Light chain variable region CDR L1 amino acid sequence
KSSQSLLNSRTRKNYLA

SEQ ID NO: 5756 - DNA, 51 bp, Artificial Sequence; identical to SEQ ID NO: 2764
  Description of Artificial Sequence: Synthetic Light chain variable region CDR L1 nucleic acid sequence

SEQ ID NO: 5757 - protein, 7 aa, Artificial Sequence
  Description of Artificial Sequence: Synthetic Light chain variable region CDR L2 amino acid sequence
WASTRES

SEQ ID NO: 5758 - DNA, 21 bp, Artificial Sequence
  Description of Artificial Sequence: Synthetic Light chain variable region CDR L2 nucleic acid sequence
tgggcatccactagggaatct

SEQ ID NO: 5759 - protein, 8 aa, Artificial Sequence
  Description of Artificial Sequence: Synthetic Light chain variable region CDR L3 amino acid sequence
KQSYNLRT

SEQ ID NO: 5760 - DNA, 24 bp, Artificial Sequence
  Description of Artificial Sequence: Synthetic Light chain variable region CDR L3 nucleic acid sequence
aagcaatcttataatcttcggacg

SEQ ID NO: 5761 - DNA, 351 bp, Artificial Sequence
  Description of Artificial Sequence: Synthetic Heavy chain variable region nucleic acid sequence
caggtgaagctggagcagtctggacctgagctggtgaagcctggggcttcagtgaggatatcctgcaaggcttctggctacaccttcacaacctactatatacactgggtgaagcagaggcctggacagggacttgagtggattggatggatttatcctggaaatgttaatgctaagtacaatgagaagttcaagggcaaggccacactgactgcagacaaatcctccagcacagcctacatgcagctcagcagcctgacctctgaggactctgcggtctatttctgtgcaagagatgatgggtactactttgactactggggccaaggcaccacggtcaccgtctcctca

SEQ ID NO: 5762 - protein, 117 aa, Artificial Sequence
  Description of Artificial Sequence: Synthetic Heavy chain variable region amino acid sequence
QVKLEQSGPELVKPGASVRISCKASGYTFTTYYIHWVKQRPGQGLEWIGWIYPGNVNAKYNEKFKGKATLTADKSSSTAYMQLSSLTSEDSAVYFCARDDGYYFDYWGQGTTVTVSS

SEQ ID NO: 5763 - protein, 9 aa, Artificial Sequence
  Description of Artificial Sequence: Synthetic Heavy chain variable region CDR H1 amino acid sequence
YTFTTYYIH

SEQ ID NO: 5764 - DNA, 27 bp, Artificial Sequence
  Description of Artificial Sequence: Synthetic Heavy chain variable region CDR H1 nucleic acid sequence
tacaccttcacaacctactatatacac

SEQ ID NO: 5765 - protein, 17 aa, Artificial Sequence
  Description of Artificial Sequence: Synthetic Heavy chain variable region CDR H2 amino acid sequence
WIYPGNVNAKYNEKFKG

SEQ ID NO: 5766 - DNA, 51 bp, Artificial Sequence
  Description of Artificial Sequence: Synthetic Heavy chain variable region CDR H2 nucleic acid sequence
tggatttatcctggaaatgttaatgctaagtacaatgagaagttcaagggc

SEQ ID NO: 5767 - protein, 10 aa, Artificial Sequence
  Description of Artificial Sequence: Synthetic Heavy chain variable region CDR H3 amino acid sequence
ARDDGYYFDY

SEQ ID NO: 5768 - DNA, 30 bp, Artificial Sequence
  Description of Artificial Sequence: Synthetic Heavy chain variable region CDR H3 nucleic acid sequence
gcaagagatgatgggtactactttgactac

SEQ ID NO: 5769 - DNA, 336 bp, Artificial Sequence
  Description of Artificial Sequence: Synthetic Light chain variable region nucleic acid sequence
gacatccagctgactcagtctccatcctccctggctgtgtcagcaggagagaaggtcactatgagctgcaaatccagtcagagtctgctcaacagtagaacccgaaagaactacttggcttggtaccagcagaaaccagggcagtctcctaaactgctgatctactgggcatccactagggaatctggggtccctgatcgcttcacaggcagtggatctgggacagatttcactctcaccatcagcagtgtgcaggctgaagacctggcagtttattactgcaagcaatcttataatcttcggacgttcggtggaggcacaaagctggaaaataaa

SEQ ID NO: 5770 - protein, 112 aa, Artificial Sequence
  Description of Artificial Sequence: Synthetic Light chain variable region amino acid sequence
DIQLTQSPSSLAVSAGEKVTMSCKSSQSLLNSRTRKNYLAWYQQKPGQSPKLLIYWASTRESGVPDRFTGSGSGTDFTLTISSVQAEDLAVYYCKQSYNLRTFGGGTKLENK

SEQ ID NO: 5771 - protein, 17 aa, Artificial Sequence
  Description of Artificial Sequence: Synthetic Light chain variable region CDR L1 amino acid sequence
KSSQSLLNSRTRKNYLA

SEQ ID NO: 5772 - DNA, 51 bp, Artificial Sequence; identical to SEQ ID NO: 2764
  Description of Artificial Sequence: Synthetic Light chain variable region CDR L1 nucleic acid sequence

SEQ ID NO: 5773 - protein, 7 aa, Artificial Sequence
  Description of Artificial Sequence: Synthetic Light chain variable region CDR L2 amino acid sequence
WASTRES

SEQ ID NO: 5774 - DNA, 21 bp, Artificial Sequence
  Description of Artificial Sequence: Synthetic Light chain variable region CDR L2 nucleic acid sequence
tgggcatccactagggaatct

SEQ ID NO: 5775 - protein, 8 aa, Artificial Sequence
  Description of Artificial Sequence: Synthetic Light chain variable region CDR L3 amino acid sequence
KQSYNLRT

SEQ ID NO: 5776 - DNA, 24 bp, Artificial Sequence
  Description of Artificial Sequence: Synthetic Light chain variable region CDR L3 nucleic acid sequence
aagcaatcttataatcttcggacg

SEQ ID NO: 5777 - DNA, 351 bp, Artificial Sequence
  Description of Artificial Sequence: Synthetic Heavy chain variable region nucleic acid sequence
gaggtccagctgcaacaatcaggacctgagctggtgaagcctggggcctcagtgagggtatcctgcaaggcttctggctacaccttcacaagctactatatacactgggtgaagcagaggcctggacagggacttgagtggattggatggatttatcctggaaatgttaatactcagtacaatgagaagttcaagggcaaggccacactgactgcagacaaatcctccagcacaacctacatgcagctcagcagcctgacctctgaggactctgcggtctatttctgtgcaagagatggtgattactactttgactactggggccaaggcaccacggtcaccgtctcctca

SEQ ID NO: 5778 - protein, 117 aa, Artificial Sequence
  Description of Artificial Sequence: Synthetic Heavy chain variable region amino acid sequence
EVQLQQSGPELVKPGASVRVSCKASGYTFTSYYIHWVKQRPGQGLEWIGWIYPGNVNTQYNEKFKGKATLTADKSSSTTYMQLSSLTSEDSAVYFCARDGDYYFDYWGQGTTVTVSS

SEQ ID NO: 5779 - protein, 9 aa, Artificial Sequence
  Description of Artificial Sequence: Synthetic Heavy chain variable region CDR H1 amino acid sequence
YTFTSYYIH

SEQ ID NO: 5780 - DNA, 27 bp, Artificial Sequence
  Description of Artificial Sequence: Synthetic Heavy chain variable region CDR H1 nucleic acid sequence
tacaccttcacaagctactatatacac

SEQ ID NO: 5781 - protein, 17 aa, Artificial Sequence
  Description of Artificial Sequence: Synthetic Heavy chain variable region CDR H2 amino acid sequence
WIYPGNVNTQYNEKFKG

SEQ ID NO: 5782 - DNA, 51 bp, Artificial Sequence
  Description of Artificial Sequence: Synthetic Heavy chain variable region CDR H2 nucleic acid sequence
tggatttatcctggaaatgttaatactcagtacaatgagaagttcaagggc

SEQ ID NO: 5783 - protein, 10 aa, Artificial Sequence
  Description of Artificial Sequence: Synthetic Heavy chain variable region CDR H3 amino acid sequence
ARDGDYYFDY

SEQ ID NO: 5784 - DNA, 30 bp, Artificial Sequence; identical to SEQ ID NO: 2792
  Description of Artificial Sequence: Synthetic Heavy chain variable region CDR H3 nucleic acid sequence

SEQ ID NO: 5785 - DNA, 336 bp, Artificial Sequence
  Description of Artificial Sequence: Synthetic Light chain variable region nucleic acid sequence
ggcattcagctgacccagtctccatcctccctggctgtgtcagcaggagagaaggtcactatgacctgcaaatccagtcagagtctgctcaacagtagaacccgaaagaactacttggcttggtaccagcagaaaccagggcagtctcctaaactgctgatctactgggcatccactagggaatctggggtccctgatcgcttcacaggcagtggatctgggacagatttcactctcaccatcagcagtgtgcaggctgaagacctggcagtttattactgcaagcaatcttataatcttcggacgttcggtggaggcacaaagttggaaataaaa

SEQ ID NO: 5786 - protein, 112 aa, Artificial Sequence
  Description of Artificial Sequence: Synthetic Light chain variable region amino acid sequence
GIQLTQSPSSLAVSAGEKVTMTCKSSQSLLNSRTRKNYLAWYQQKPGQSPKLLIYWASTRESGVPDRFTGSGSGTDFTLTISSVQAEDLAVYYCKQSYNLRTFGGGTKLEIK

SEQ ID NO: 5787 - protein, 17 aa, Artificial Sequence
  Description of Artificial Sequence: Synthetic Light chain variable region CDR L1 amino acid sequence
KSSQSLLNSRTRKNYLA

SEQ ID NO: 5788 - DNA, 51 bp, Artificial Sequence; identical to SEQ ID NO: 2764
  Description of Artificial Sequence: Synthetic Light chain variable region CDR L1 nucleic acid sequence

SEQ ID NO: 5789 - protein, 7 aa, Artificial Sequence
  Description of Artificial Sequence: Synthetic Light chain variable region CDR L2 amino acid sequence
WASTRES

SEQ ID NO: 5790 - DNA, 21 bp, Artificial Sequence
  Description of Artificial Sequence: Synthetic Light chain variable region CDR L2 nucleic acid sequence
tgggcatccactagggaatct

SEQ ID NO: 5791 - protein, 8 aa, Artificial Sequence
  Description of Artificial Sequence: Synthetic Light chain variable region CDR L3 amino acid sequence
KQSYNLRT

SEQ ID NO: 5792 - DNA, 24 bp, Artificial Sequence
  Description of Artificial Sequence: Synthetic Light chain variable region CDR L3 nucleic acid sequence
aagcaatcttataatcttcggacg

SEQ ID NO: 5793 - DNA, 351 bp, Artificial Sequence
  Description of Artificial Sequence: Synthetic Heavy chain variable region nucleic acid sequence
gaggtcaagctgcaggagtctggacctgagctggtgaagcctggggcttcagtgaggatatcctgcaaggcttctggctacaccttcacaagctactatatacactgggtgaagcagaggcctggacagggacttgagtggattggatggatttatcctggaaatgttaatactaagtacaatgagaagttcaagggcaaggccacactgactgcagacaaatcctccagcacagcctacatgcagctcagcagcctgacctctgaggactctgcggtctatttctgtgcaagagatggtgattacttctttgactactggggccaaggcaccacggtcaccgtctcctca

SEQ ID NO: 5794 - protein, 117 aa, Artificial Sequence
  Description of Artificial Sequence: Synthetic Heavy chain variable region amino acid sequence
EVKLQESGPELVKPGASVRISCKASGYTFTSYYIHWVKQRPGQGLEWIGWIYPGNVNTKYNEKFKGKATLTADKSSSTAYMQLSSLTSEDSAVYFCARDGDYFFDYWGQGTTVTVSS

SEQ ID NO: 5795 - protein, 9 aa, Artificial Sequence
  Description of Artificial Sequence: Synthetic Heavy chain variable region CDR H1 amino acid sequence
YTFTSYYIH

SEQ ID NO: 5796 - DNA, 27 bp, Artificial Sequence
  Description of Artificial Sequence: Synthetic Heavy chain variable region CDR H1 nucleic acid sequence
tacaccttcacaagctactatatacac

SEQ ID NO: 5797 - protein, 17 aa, Artificial Sequence
  Description of Artificial Sequence: Synthetic Heavy chain variable region CDR H2 amino acid sequence
WIYPGNVNTKYNEKFKG

SEQ ID NO: 5798 - DNA, 51 bp, Artificial Sequence; identical to SEQ ID NO: 2806
  Description of Artificial Sequence: Synthetic Heavy chain variable region CDR H2 nucleic acid sequence

SEQ ID NO: 5799 - protein, 10 aa, Artificial Sequence
  Description of Artificial Sequence: Synthetic Heavy chain variable region CDR H3 amino acid sequence
ARDGDYFFDY

SEQ ID NO: 5800 - DNA, 30 bp, Artificial Sequence
  Description of Artificial Sequence: Synthetic Heavy chain variable region CDR H3 nucleic acid sequence
gcaagagatggtgattacttctttgactac

SEQ ID NO: 5801 - DNA, 336 bp, Artificial Sequence
  Description of Artificial Sequence: Synthetic Light chain variable region nucleic acid sequence
gacatccagctcacccagtctccatcctccctggctgtgtcagcaggagagaaggtcactatgagctgcaaatccagtcagagtctgctcaacagtagaacccaaaagaactacttggcttggtaccagcagaaaccagggcagtctcctaaactgctgatctactgggcatccactagggaatctggggtccctgatcgcttcacaggcagtggatctgggacagatttcactctcaccatcagcagtgtgcaggctgaagacctggcagtttattactgcaagcaatcttataatcttcggacgttcggtggaggcaccaagctgaaaatcaaa

SEQ ID NO: 5802 - protein, 112 aa, Artificial Sequence
  Description of Artificial Sequence: Synthetic Light chain variable region amino acid sequence
DIQLTQSPSSLAVSAGEKVTMSCKSSQSLLNSRTQKNYLAWYQQKPGQSPKLLIYWASTRESGVPDRFTGSGSGTDFTLTISSVQAEDLAVYYCKQSYNLRTFGGGTKLKIK

SEQ ID NO: 5803 - protein, 17 aa, Artificial Sequence
  Description of Artificial Sequence: Synthetic Light chain variable region CDR L1 amino acid sequence
KSSQSLLNSRTQKNYLA

SEQ ID NO: 5804 - DNA, 51 bp, Artificial Sequence
  Description of Artificial Sequence: Synthetic Light chain variable region CDR L1 nucleic acid sequence
aaatccagtcagagtctgctcaacagtagaacccaaaagaactacttggct

SEQ ID NO: 5805 - protein, 7 aa, Artificial Sequence
  Description of Artificial Sequence: Synthetic Light chain variable region CDR L2 amino acid sequence
WASTRES

SEQ ID NO: 5806 - DNA, 21 bp, Artificial Sequence
  Description of Artificial Sequence: Synthetic Light chain variable region CDR L2 nucleic acid sequence
tgggcatccactagggaatct

SEQ ID NO: 5807 - protein, 8 aa, Artificial Sequence
  Description of Artificial Sequence: Synthetic Light chain variable region CDR L3 amino acid sequence
KQSYNLRT

SEQ ID NO: 5808 - DNA, 24 bp, Artificial Sequence
  Description of Artificial Sequence: Synthetic Light chain variable region CDR L3 nucleic acid sequence
aagcaatcttataatcttcggacg

SEQ ID NO: 5809 - DNA, 375 bp, Artificial Sequence
  Description of Artificial Sequence: Synthetic Heavy chain variable region nucleic acid sequence
gaggtgcagctggtggagtctgggggaggcttggtccagcctggagggtccctgaaactctcctgtgcagcctctggattcaccttcaataaatacgccatgaactgggtccgccaggctccagggaaggggctggagtgggttgcccgtattagaagcaaatataacaattacgccacatactacgccgactctgtgaaagacagattcaccatctcaagagatgattcaaagaacacagcgtatctgcaaatgaacaacctgaaaaccgaggacacggcggtgtactactgcgtgaggcacggcaacttcgggaattcctatatttcatactgggcctactggggccaaggaaccctggtcaccgtctcctca

SEQ ID NO: 5810 - protein, 125 aa, Artificial Sequence
  Description of Artificial Sequence: Synthetic Heavy chain variable region amino acid sequence
EVQLVESGGGLVQPGGSLKLSCAASGFTFNKYAMNWVRQAPGKGLEWVARIRSKYNNYATYYADSVKDRFTISRDDSKNTAYLQMNNLKTEDTAVYYCVRHGNFGNSYISYWAYWGQGTLVTVSS

SEQ ID NO: 5811 - protein, 9 aa, Artificial Sequence
  Description of Artificial Sequence: Synthetic Heavy chain variable region CDR H1 amino acid sequence
FTFNKYAMN

SEQ ID NO: 5812 - DNA, 27 bp, Artificial Sequence
  Description of Artificial Sequence: Synthetic Heavy chain variable region CDR H1 nucleic acid sequence
ttcaccttcaataaatacgccatgaac

SEQ ID NO: 5813 - protein, 19 aa, Artificial Sequence
  Description of Artificial Sequence: Synthetic Heavy chain variable region CDR H2 amino acid sequence
RIRSKYNNYATYYADSVKD

SEQ ID NO: 5814 - DNA, 57 bp, Artificial Sequence
  Description of Artificial Sequence: Synthetic Heavy chain variable region CDR H2 nucleic acid sequence
cgtattagaagcaaatataacaattacgccacatactacgccgactctgtgaaagac

SEQ ID NO: 5815 - protein, 16 aa, Artificial Sequence
  Description of Artificial Sequence: Synthetic Heavy chain variable region CDR H3 amino acid sequence
VRHGNFGNSYISYWAY

SEQ ID NO: 5816 - DNA, 48 bp, Artificial Sequence
  Description of Artificial Sequence: Synthetic Heavy chain variable region CDR H3 nucleic acid sequence
gtgaggcacggcaacttcgggaattcctatatttcatactgggcctac

SEQ ID NO: 5817 - DNA, 327 bp, Artificial Sequence
  Description of Artificial Sequence: Synthetic Light chain variable region nucleic acid sequence
cagactgtggtgactcaggagccctcactgactgtgtccccaggagggacagtcactctcacctgtggctccagcactggagctgtcaccagtggtaattatcccaactgggtccagcagaagcctggccaagcccccaggggactgattggtggtacaaaattcctggcccccgggacacctgcccggttctcaggctccctccttgggggcaaagctgccctgaccctttcgggtgtgcagcctgaggatgaggctgagtattactgcgtgctctggtatagtaatcggtgggtgttcggcggagggaccaagctgaccgtccta

SEQ ID NO: 5818 - protein, 109 aa, Artificial Sequence
  Description of Artificial Sequence: Synthetic Light chain variable region amino acid sequence
QTVVTQEPSLTVSPGGTVTLTCGSSTGAVTSGNYPNWVQQKPGQAPRGLIGGTKFLAPGTPARFSGSLLGGKAALTLSGVQPEDEAEYYCVLWYSNRWVFGGGTKLTVL

SEQ ID NO: 5819 - protein, 14 aa, Artificial Sequence
  Description of Artificial Sequence: Synthetic Light chain variable region CDR L1 amino acid sequence
GSSTGAVTSGNYPN

SEQ ID NO: 5820 - DNA, 42 bp, Artificial Sequence
  Description of Artificial Sequence: Synthetic Light chain variable region CDR L1 nucleic acid sequence
ggctccagcactggagctgtcaccagtggtaattatcccaac

SEQ ID NO: 5821 - protein, 7 aa, Artificial Sequence
  Description of Artificial Sequence: Synthetic Light chain variable region CDR L2 amino acid sequence
GTKFLAP

SEQ ID NO: 5822 - DNA, 21 bp, Artificial Sequence
  Description of Artificial Sequence: Synthetic Light chain variable region CDR L2 nucleic acid sequence
ggtacaaaattcctggccccc

SEQ ID NO: 5823 - protein, 9 aa, Artificial Sequence
  Description of Artificial Sequence: Synthetic Light chain variable region CDR L3 amino acid sequence
VLWYSNRWV

SEQ ID NO: 5824 - DNA, 27 bp, Artificial Sequence
  Description of Artificial Sequence: Synthetic Light chain variable region CDR L3 nucleic acid sequence
gtgctctggtatagtaatcggtgggtg

SEQ ID NO: 5825 - DNA, 375 bp, Artificial Sequence; identical to SEQ ID NO: 5809
  Description of Artificial Sequence: Synthetic Heavy chain variable region nucleic acid sequence

SEQ ID NO: 5826 - protein, 125 aa, Artificial Sequence; identical to SEQ ID NO: 5810
  Description of Artificial Sequence: Synthetic Heavy chain variable region amino acid sequence

SEQ ID NO: 5827 - protein, 9 aa, Artificial Sequence
  Description of Artificial Sequence: Synthetic Heavy chain variable region CDR H1 amino acid sequence
FTFNKYAMN

SEQ ID NO: 5828 - DNA, 27 bp, Artificial Sequence
  Description of Artificial Sequence: Synthetic Heavy chain variable region CDR H1 nucleic acid sequence
ttcaccttcaataaatacgccatgaac

SEQ ID NO: 5829 - protein, 19 aa, Artificial Sequence
  Description of Artificial Sequence: Synthetic Heavy chain variable region CDR H2 amino acid sequence
RIRSKYNNYATYYADSVKD

SEQ ID NO: 5830 - DNA, 57 bp, Artificial Sequence; identical to SEQ ID NO: 5814
  Description of Artificial Sequence: Synthetic Heavy chain variable region CDR H2 nucleic acid sequence

SEQ ID NO: 5831 - protein, 16 aa, Artificial Sequence
  Description of Artificial Sequence: Synthetic Heavy chain variable region CDR H3 amino acid sequence
VRHGNFGNSYISYWAY

SEQ ID NO: 5832 - DNA, 48 bp, Artificial Sequence; identical to SEQ ID NO: 5816
  Description of Artificial Sequence: Synthetic Heavy chain variable region CDR H3 nucleic acid sequence

SEQ ID NO: 5833 - DNA, 327 bp, Artificial Sequence; identical to SEQ ID NO: 5817
  Description of Artificial Sequence: Synthetic Light chain variable region nucleic acid sequence

SEQ ID NO: 5834 - protein, 109 aa, Artificial Sequence; identical to SEQ ID NO: 5818
  Description of Artificial Sequence: Synthetic Light chain variable region amino acid sequence

SEQ ID NO: 5835 - protein, 14 aa, Artificial Sequence
  Description of Artificial Sequence: Synthetic Light chain variable region CDR L1 amino acid sequence
GSSTGAVTSGNYPN

SEQ ID NO: 5836 - DNA, 42 bp, Artificial Sequence; identical to SEQ ID NO: 5820
  Description of Artificial Sequence: Synthetic Light chain variable region CDR L1 nucleic acid sequence

SEQ ID NO: 5837 - protein, 7 aa, Artificial Sequence
  Description of Artificial Sequence: Synthetic Light chain variable region CDR L2 amino acid sequence
GTKFLAP

SEQ ID NO: 5838 - DNA, 21 bp, Artificial Sequence
  Description of Artificial Sequence: Synthetic Light chain variable region CDR L2 nucleic acid sequence
ggtacaaaattcctggccccc

SEQ ID NO: 5839 - protein, 9 aa, Artificial Sequence
  Description of Artificial Sequence: Synthetic Light chain variable region CDR L3 amino acid sequence
VLWYSNRWV

SEQ ID NO: 5840 - DNA, 27 bp, Artificial Sequence
  Description of Artificial Sequence: Synthetic Light chain variable region CDR L3 nucleic acid sequence
gtgctctggtatagtaatcggtgggtg

SEQ ID NO: 5841 - DNA, 357 bp, Artificial Sequence
  Description of Artificial Sequence: Synthetic Heavy chain variable region nucleic acid sequence
gaggtgcagctggtgcagtctggggctgaggtgaagaagcctggggcctcagtgaaggtttcctgcaaggcatctggattcaccttcaccagctactatatacactgggtgcgacaggcccctggacaagggcttgagtggataggatggatctaccctgaaaatgataacacaaagtacaacgagaagttcaaggacagagtcaccataaccgcggacacgtccacgagcacagcctacctggagctgagcagcctgagatctgaggacacggcggtgtactactgcgccagggacggatattctagatattactttgactactggggccaaggaaccctggtcaccgtctcctca

SEQ ID NO: 5842 - protein, 119 aa, Artificial Sequence
  Description of Artificial Sequence: Synthetic Heavy chain variable region amino acid sequence
EVQLVQSGAEVKKPGASVKVSCKASGFTFTSYYIHWVRQAPGQGLEWIGWIYPENDNTKYNEKFKDRVTITADTSTSTAYLELSSLRSEDTAVYYCARDGYSRYYFDYWGQGTLVTVSS

SEQ ID NO: 5843 - protein, 9 aa, Artificial Sequence
  Description of Artificial Sequence: Synthetic Heavy chain variable region CDR H1 amino acid sequence
FTFTSYYIH

SEQ ID NO: 5844 - DNA, 27 bp, Artificial Sequence
  Description of Artificial Sequence: Synthetic Heavy chain variable region CDR H1 nucleic acid sequence
ttcaccttcaccagctactatatacac

SEQ ID NO: 5845 - protein, 17 aa, Artificial Sequence
  Description of Artificial Sequence: Synthetic Heavy chain variable region CDR H2 amino acid sequence
WIYPENDNTKYNEKFKD

SEQ ID NO: 5846 - DNA, 51 bp, Artificial Sequence
  Description of Artificial Sequence: Synthetic Heavy chain variable region CDR H2 nucleic acid sequence
tggatctaccctgaaaatgataacacaaagtacaacgagaagttcaaggac

SEQ ID NO: 5847 - protein, 12 aa, Artificial Sequence
  Description of Artificial Sequence: Synthetic Heavy chain variable region CDR H3 amino acid sequence
ARDGYSRYYFDY

SEQ ID NO: 5848 - DNA, 36 bp, Artificial Sequence
  Description of Artificial Sequence: Synthetic Heavy chain variable region CDR H3 nucleic acid sequence
gccagggacggatattctagatattactttgactac

SEQ ID NO: 5849 - DNA, 336 bp, Artificial Sequence
  Description of Artificial Sequence: Synthetic Light chain variable region nucleic acid sequence
gacatcgtgatgacccagtctccagactccctggctgtgtctctgggcgagagggccaccatcaactgcaagtccagccagagtcttttaaacagcagaaccagaaagaactacttagcttggtaccagcagaaaccaggacagtctcctaagctgctcatttactggacatctacccggaagtccggggtccctgaccgattcagtggcagcgggtctgggacagatttcactctcaccatcagcagcctgcaggctgaagatgtggcagtttattactgtaagcaaagcttcatccttaggacgttcggccaagggaccaaggtggaaatcaaa

SEQ ID NO: 5850 - protein, 112 aa, Artificial Sequence
  Description of Artificial Sequence: Synthetic Light chain variable region amino acid sequence
DIVMTQSPDSLAVSLGERATINCKSSQSLLNSRTRKNYLAWYQQKPGQSPKLLIYWTSTRKSGVPDRFSGSGSGTDFTLTISSLQAEDVAVYYCKQSFILRTFGQGTKVEIK

SEQ ID NO: 5851 - protein, 17 aa, Artificial Sequence
  Description of Artificial Sequence: Synthetic Light chain variable region CDR L1 amino acid sequence
KSSQSLLNSRTRKNYLA

SEQ ID NO: 5852 - DNA, 51 bp, Artificial Sequence; identical to SEQ ID NO: 2988
  Description of Artificial Sequence: Synthetic Light chain variable region CDR L1 nucleic acid sequence

SEQ ID NO: 5853 - protein, 7 aa, Artificial Sequence
  Description of Artificial Sequence: Synthetic Light chain variable region CDR L2 amino acid sequence
WTSTRKS

SEQ ID NO: 5854 - DNA, 21 bp, Artificial Sequence
  Description of Artificial Sequence: Synthetic Light chain variable region CDR L2 nucleic acid sequence
tggacatctacccggaagtcc

SEQ ID NO: 5855 - protein, 8 aa, Artificial Sequence
  Description of Artificial Sequence: Synthetic Light chain variable region CDR L3 amino acid sequence
KQSFILRT

SEQ ID NO: 5856 - DNA, 24 bp, Artificial Sequence
  Description of Artificial Sequence: Synthetic Light chain variable region CDR L3 nucleic acid sequence
aagcaaagcttcatccttaggacg

SEQ ID NO: 5857 - DNA, 369 bp, Artificial Sequence
  Description of Artificial Sequence: Synthetic Heavy chain variable region nucleic acid sequence
gaagtgcagctggtggagtctgggggaggcttggtacagcctggcaggtccctgagactctcctgtgcagcctctggattcacctttgatgattataccatgcactgggtccggcaagctccagggaagggcctggagtgggtctcaggtattagttggaatagtggtagcataggctatgcggactctgtgaagggccgattcaccatctccagagacaacgccaagaagtccctgtatctgcaaatgaacagtctgagagctgaggacacggcgttgtactactgcgccaaggacaattccggatacggccactactactacggtatggacgtctgggggcaagggaccacggtcaccgtcgcctca

SEQ ID NO: 5858 - protein, 123 aa, Artificial Sequence
  Description of Artificial Sequence: Synthetic Heavy chain variable region amino acid sequence
EVQLVESGGGLVQPGRSLRLSCAASGFTFDDYTMHWVRQAPGKGLEWVSGISWNSGSIGYADSVKGRFTISRDNAKKSLYLQMNSLRAEDTALYYCAKDNSGYGHYYYGMDVWGQGTTVTVAS

SEQ ID NO: 5859 - protein, 9 aa, Artificial Sequence
  Description of Artificial Sequence: Synthetic Heavy chain variable region CDR H1 amino acid sequence
FTFDDYTMH

SEQ ID NO: 5860 - DNA, 27 bp, Artificial Sequence
  Description of Artificial Sequence: Synthetic Heavy chain variable region CDR H1 nucleic acid sequence
ttcacctttgatgattataccatgcac

SEQ ID NO: 5861 - protein, 17 aa, Artificial Sequence
  Description of Artificial Sequence: Synthetic Heavy chain variable region CDR H2 amino acid sequence
GISWNSGSIGYADSVKG

SEQ ID NO: 5862 - DNA, 51 bp, Artificial Sequence
  Description of Artificial Sequence: Synthetic Heavy chain variable region CDR H2 nucleic acid sequence
ggtattagttggaatagtggtagcataggctatgcggactctgtgaagggc

SEQ ID NO: 5863 - protein, 16 aa, Artificial Sequence
  Description of Artificial Sequence: Synthetic Heavy chain variable region CDR H3 amino acid sequence
AKDNSGYGHYYYGMDV

SEQ ID NO: 5864 - DNA, 48 bp, Artificial Sequence
  Description of Artificial Sequence: Synthetic Heavy chain variable region CDR H3 nucleic acid sequence
gccaaggacaattccggatacggccactactactacggtatggacgtc

SEQ ID NO: 5865 - DNA, 321 bp, Artificial Sequence
  Description of Artificial Sequence: Synthetic Light chain variable region nucleic acid sequence
gaaatagtgatgacgcagtctccagccaccctgtctgtgtctccaggggaaagagccaccctctcctgcagggccagtcagagtgttagcagcaacttagcctggtaccagcagaaacctggccaggctcccaggctcctcatctatggtgcatccaccagggccactggtatcccagccaggttcagtggcagtgggtctgggacagagttcactctcaccatcagcagcctgcagtctgaagattttgcagtttattactgtcaacattacatcaattggcctctcactttcggcggagggaccaaggtggagatcaaa

SEQ ID NO: 5866 - protein, 107 aa, Artificial Sequence
  Description of Artificial Sequence: Synthetic Light chain variable region amino acid sequence
EIVMTQSPATLSVSPGERATLSCRASQSVSSNLAWYQQKPGQAPRLLIYGASTRATGIPARFSGSGSGTEFTLTISSLQSEDFAVYYCQHYINWPLTFGGGTKVEIK

SEQ ID NO: 5867 - protein, 11 aa, Artificial Sequence
  Description of Artificial Sequence: Synthetic Light chain variable region CDR L1 amino acid sequence
RASQSVSSNLA

SEQ ID NO: 5868 - DNA, 33 bp, Artificial Sequence
  Description of Artificial Sequence: Synthetic Light chain variable region CDR L1 nucleic acid sequence
agggccagtcagagtgttagcagcaacttagcc

SEQ ID NO: 5869 - protein, 7 aa, Artificial Sequence
  Description of Artificial Sequence: Synthetic Light chain variable region CDR L2 amino acid sequence
GASTRAT

SEQ ID NO: 5870 - DNA, 21 bp, Artificial Sequence
  Description of Artificial Sequence: Synthetic Light chain variable region CDR L2 nucleic acid sequence
ggtgcatccaccagggccact

SEQ ID NO: 5871 - protein, 9 aa, Artificial Sequence
  Description of Artificial Sequence: Synthetic Light chain variable region CDR L3 amino acid sequence
QHYINWPLT

SEQ ID NO: 5872 - DNA, 27 bp, Artificial Sequence
  Description of Artificial Sequence: Synthetic Light chain variable region CDR L3 nucleic acid sequence
caacattacatcaattggcctctcact

SEQ ID NO: 5873 - DNA, 369 bp, Artificial Sequence
  Description of Artificial Sequence: Synthetic Heavy chain variable region nucleic acid sequence
gaagtgcagctggtggagtctgggggaggcttggtacagcctggcggatccctgagactctcctgtgcagccactggattcacctttgatgatttcaccatgcactgggtccggcaagctccagggaagggcctggagtgggtctcaggtattagttggaatagtggtagcataggctatgtggactctgtgaagggccgattcaccatctccagagacaacgccaagaactccctgtatctgcaaatgaacagtctgagagctgaggacacggcgttgtactactgcgccaaggacaacagcggatacggctactactactacggtatggacgtctgggggcaagggaccacggtcaccgtctcctca

SEQ ID NO: 5874 - protein, 123 aa, Artificial Sequence
  Description of Artificial Sequence: Synthetic Heavy chain variable region amino acid sequence
EVQLVESGGGLVQPGGSLRLSCAATGFTFDDFTMHWVRQAPGKGLEWVSGISWNSGSIGYVDSVKGRFTISRDNAKNSLYLQMNSLRAEDTALYYCAKDNSGYGYYYYGMDVWGQGTTVTVSS

SEQ ID NO: 5875 - protein, 9 aa, Artificial Sequence
  Description of Artificial Sequence: Synthetic Heavy chain variable region CDR H1 amino acid sequence
FTFDDFTMH

SEQ ID NO: 5876 - DNA, 27 bp, Artificial Sequence
  Description of Artificial Sequence: Synthetic Heavy chain variable region CDR H1 nucleic acid sequence
ttcacctttgatgatttcaccatgcac

SEQ ID NO: 5877 - protein, 17 aa, Artificial Sequence
  Description of Artificial Sequence: Synthetic Heavy chain variable region CDR H2 amino acid sequence
GISWNSGSIGYVDSVKG

SEQ ID NO: 5878 - DNA, 51 bp, Artificial Sequence
  Description of Artificial Sequence: Synthetic Heavy chain variable region CDR H2 nucleic acid sequence
ggtattagttggaatagtggtagcataggctatgtggactctgtgaagggc

SEQ ID NO: 5879 - protein, 16 aa, Artificial Sequence
  Description of Artificial Sequence: Synthetic Heavy chain variable region CDR H3 amino acid sequence
AKDNSGYGYYYYGMDV

SEQ ID NO: 5880 - DNA, 48 bp, Artificial Sequence
  Description of Artificial Sequence: Synthetic Heavy chain variable region CDR H3 nucleic acid sequence
gccaaggacaacagcggatacggctactactactacggtatggacgtc

SEQ ID NO: 5881 - DNA, 321 bp, Artificial Sequence
  Description of Artificial Sequence: Synthetic Light chain variable region nucleic acid sequence
gaaatagtgatgacgcagtctccagccaccctgtctgtgtctccaggggaaagagccaccctctcctgcagggccagtcacagtgttagcagaaactcagcctggtaccagcagaaacctggccaggctcccaggctcctcatctatggtgcatccaccagggccactggtatcccagccaggttcagtggcagtgggtctgggacagagttcactctcaccatcagcagcctgcagtctgaagattttgcaatttattactgtcaacagtataataattggccgctcactttcggcggagggaccaaggtggagatcaaa

SEQ ID NO: 5882 - protein, 107 aa, Artificial Sequence
  Description of Artificial Sequence: Synthetic Light chain variable region amino acid sequence
EIVMTQSPATLSVSPGERATLSCRASHSVSRNSAWYQQKPGQAPRLLIYGASTRATGIPARFSGSGSGTEFTLTISSLQSEDFAIYYCQQYNNWPLTFGGGTKVEIK

SEQ ID NO: 5883 - protein, 11 aa, Artificial Sequence
  Description of Artificial Sequence: Synthetic Light chain variable region CDR L1 amino acid sequence
RASHSVSRNSA

SEQ ID NO: 5884 - DNA, 33 bp, Artificial Sequence
  Description of Artificial Sequence: Synthetic Light chain variable region CDR L1 nucleic acid sequence
agggccagtcacagtgttagcagaaactcagcc

SEQ ID NO: 5885 - protein, 7 aa, Artificial Sequence
  Description of Artificial Sequence: Synthetic Light chain variable region CDR L2 amino acid sequence
GASTRAT

SEQ ID NO: 5886 - DNA, 21 bp, Artificial Sequence
  Description of Artificial Sequence: Synthetic Light chain variable region CDR L2 nucleic acid sequence
ggtgcatccaccagggccact

SEQ ID NO: 5887 - protein, 9 aa, Artificial Sequence
  Description of Artificial Sequence: Synthetic Light chain variable region CDR L3 amino acid sequence
QQYNNWPLT

SEQ ID NO: 5888 - DNA, 27 bp, Artificial Sequence
  Description of Artificial Sequence: Synthetic Light chain variable region CDR L3 nucleic acid sequence
caacagtataataattggccgctcact

SEQ ID NO: 5889 - DNA, 354 bp, Artificial Sequence
  Description of Artificial Sequence: Synthetic Heavy chain variable region nucleic acid sequence
caggtgcagctggtggagtctgggggaggcgtggtccagcctgggaggtccctgagactctcctgtgcagcgtctggattcaccttcagaagctatgccatgcactgggtccgccaggctccaggcaaggggctggagtgggtggcaatggtatactatgatggaaataatcaatactatgcagactccgtgaggggccgattcaccatctccagagacaattccaagaacacgctgtatctgcaaatgaacagcctgagagccgacgacacggcggtgtacttctgcgctagaggtcctggctataactggttggacccctggggccagggaaccctggtcaccgtctcctca

SEQ ID NO: 5890 - protein, 118 aa, Artificial Sequence
  Description of Artificial Sequence: Synthetic Heavy chain variable region amino acid sequence
QVQLVESGGGVVQPGRSLRLSCAASGFTFRSYAMHWVRQAPGKGLEWVAMVYYDGNNQYYADSVRGRFTISRDNSKNTLYLQMNSLRADDTAVYFCARGPGYNWLDPWGQGTLVTVSS

SEQ ID NO: 5891 - protein, 9 aa, Artificial Sequence
  Description of Artificial Sequence: Synthetic Heavy chain variable region CDR H1 amino acid sequence
FTFRSYAMH

SEQ ID NO: 5892 - DNA, 27 bp, Artificial Sequence
  Description of Artificial Sequence: Synthetic Heavy chain variable region CDR H1 nucleic acid sequence
ttcaccttcagaagctatgccatgcac

SEQ ID NO: 5893 - protein, 17 aa, Artificial Sequence
  Description of Artificial Sequence: Synthetic Heavy chain variable region CDR H2 amino acid sequence
MVYYDGNNQYYADSVRG

SEQ ID NO: 5894 - DNA, 51 bp, Artificial Sequence
  Description of Artificial Sequence: Synthetic Heavy chain variable region CDR H2 nucleic acid sequence
atggtatactatgatggaaataatcaatactatgcagactccgtgaggggc

SEQ ID NO: 5895 - protein, 11 aa, Artificial Sequence
  Description of Artificial Sequence: Synthetic Heavy chain variable region CDR H3 amino acid sequence
ARGPGYNWLDP

SEQ ID NO: 5896 - DNA, 33 bp, Artificial Sequence
  Description of Artificial Sequence: Synthetic Heavy chain variable region CDR H3 nucleic acid sequence
gctagaggtcctggctataactggttggacccc

SEQ ID NO: 5897 - DNA, 321 bp, Artificial Sequence
  Description of Artificial Sequence: Synthetic Light chain variable region nucleic acid sequence
gaaatagtgatgacgcagtctccagccaccctgtctgtgtctccaggggaaagagccaccctctcctgcagggccagtcagagtgttagcagaaacttagcctggtaccagcagaaacctggccaggctcccaggctcctcatctatggtgcatccaccagggccactggtatcccagccaggttcagtggcagtgggtctgggacagacttcactctcaccatcagcagcctgcagtctgaagattttgcagtttattactgtcaacagtacaacaattggcctctcactttcggcggagggaccaaggtggtgatcaaa

SEQ ID NO: 5898 - protein, 107 aa, Artificial Sequence
  Description of Artificial Sequence: Synthetic Light chain variable region amino acid sequence
EIVMTQSPATLSVSPGERATLSCRASQSVSRNLAWYQQKPGQAPRLLIYGASTRATGIPARFSGSGSGTDFTLTISSLQSEDFAVYYCQQYNNWPLTFGGGTKVVIK

SEQ ID NO: 5899 - protein, 11 aa, Artificial Sequence
  Description of Artificial Sequence: Synthetic Light chain variable region CDR L1 amino acid sequence
RASQSVSRNLA

SEQ ID NO: 5900 - DNA, 33 bp, Artificial Sequence
  Description of Artificial Sequence: Synthetic Light chain variable region CDR L1 nucleic acid sequence
agggccagtcagagtgttagcagaaacttagcc

SEQ ID NO: 5901 - protein, 7 aa, Artificial Sequence
  Description of Artificial Sequence: Synthetic Light chain variable region CDR L2 amino acid sequence
GASTRAT

SEQ ID NO: 5902 - DNA, 21 bp, Artificial Sequence
  Description of Artificial Sequence: Synthetic Light chain variable region CDR L2 nucleic acid sequence
ggtgcatccaccagggccact

SEQ ID NO: 5903 - protein, 9 aa, Artificial Sequence
  Description of Artificial Sequence: Synthetic Light chain variable region CDR L3 amino acid sequence
QQYNNWPLT

SEQ ID NO: 5904 - DNA, 27 bp, Artificial Sequence
  Description of Artificial Sequence: Synthetic Light chain variable region CDR L3 nucleic acid sequence
caacagtacaacaattggcctctcact

SEQ ID NO: 5905 - DNA, 354 bp, Artificial Sequence
  Description of Artificial Sequence: Synthetic Heavy chain variable region nucleic acid sequence
caggtgcagctggtggagtctgggggaggcgtggtccagcctgggaggtccctgagactcgcctgtgtagcgtctggattcaccttcagaagctatggcatgcactgggtccgccaggctccaggcaaggggctgcagtgggtggcaatgatatactatgatggaaagaataaatactatgcagactccgtgaggggccgattcaccatctccagagacaattccaagaacacgctgtatctgcaaatgaacaacctgagagtcgaggacacggcgatgtacttctgcgccagaggtccaggctataactggttggacccctggggccagggaaccctggtcaccgtctcctca

SEQ ID NO: 5906 - protein, 118 aa, Artificial Sequence
  Description of Artificial Sequence: Synthetic Heavy chain variable region amino acid sequence
QVQLVESGGGVVQPGRSLRLACVASGFTFRSYGMHWVRQAPGKGLQWVAMIYYDGKNKYYADSVRGRFTISRDNSKNTLYLQMNNLRVEDTAMYFCARGPGYNWLDPWGQGTLVTVSS

SEQ ID NO: 5907 - protein, 9 aa, Artificial Sequence
  Description of Artificial Sequence: Synthetic Heavy chain variable region CDR H1 amino acid sequence
FTFRSYGMH

SEQ ID NO: 5908 - DNA, 27 bp, Artificial Sequence
  Description of Artificial Sequence: Synthetic Heavy chain variable region CDR H1 nucleic acid sequence
ttcaccttcagaagctatggcatgcac

SEQ ID NO: 5909 - protein, 17 aa, Artificial Sequence
  Description of Artificial Sequence: Synthetic Heavy chain variable region CDR H2 amino acid sequence
MIYYDGKNKYYADSVRG

SEQ ID NO: 5910 - DNA, 51 bp, Artificial Sequence
  Description of Artificial Sequence: Synthetic Heavy chain variable region CDR H2 nucleic acid sequence
atgatatactatgatggaaagaataaatactatgcagactccgtgaggggc

SEQ ID NO: 5911 - protein, 11 aa, Artificial Sequence
  Description of Artificial Sequence: Synthetic Heavy chain variable region CDR H3 amino acid sequence
ARGPGYNWLDP

SEQ ID NO: 5912 - DNA, 33 bp, Artificial Sequence
  Description of Artificial Sequence: Synthetic Heavy chain variable region CDR H3 nucleic acid sequence
gccagaggtccaggctataactggttggacccc

SEQ ID NO: 5913 - DNA, 321 bp, Artificial Sequence
  Description of Artificial Sequence: Synthetic Light chain variable region nucleic acid sequence
gaaatagtgatgacgcagtctccagccaccctgtctgtgtctccaggggaaagagccaccctctcctgcagggccagtcagagaattagcagcaacttagcctggtaccagcagaaacctggccaggctcccaggctcctcatctatggtgcatccaccagggccactggtagcccagccaggttcagtggcagtgggtctgggacagacttcactctcaccatcagcagcctgcagtctgaagatgttgcagtttattactgtcagcagcatcataactggcctctcactttcggcggagggaccaaggtggagatcaaa

SEQ ID NO: 5914 - protein, 107 aa, Artificial Sequence
  Description of Artificial Sequence: Synthetic Light chain variable region amino acid sequence
EIVMTQSPATLSVSPGERATLSCRASQRISSNLAWYQQKPGQAPRLLIYGASTRATGSPARFSGSGSGTDFTLTISSLQSEDVAVYYCQQHHNWPLTFGGGTKVEIK

SEQ ID NO: 5915 - protein, 11 aa, Artificial Sequence
  Description of Artificial Sequence: Synthetic Light chain variable region CDR L1 amino acid sequence
RASQRISSNLA

SEQ ID NO: 5916 - DNA, 33 bp, Artificial Sequence
  Description of Artificial Sequence: Synthetic Light chain variable region CDR L1 nucleic acid sequence
agggccagtcagagaattagcagcaacttagcc

SEQ ID NO: 5917 - protein, 7 aa, Artificial Sequence
  Description of Artificial Sequence: Synthetic Light chain variable region CDR L2 amino acid sequence
GASTRAT

SEQ ID NO: 5918 - DNA, 21 bp, Artificial Sequence
  Description of Artificial Sequence: Synthetic Light chain variable region CDR L2 nucleic acid sequence
ggtgcatccaccagggccact

SEQ ID NO: 5919 - protein, 9 aa, Artificial Sequence
  Description of Artificial Sequence: Synthetic Light chain variable region CDR L3 amino acid sequence
QQHHNWPLT

SEQ ID NO: 5920 - DNA, 27 bp, Artificial Sequence
  Description of Artificial Sequence: Synthetic Light chain variable region CDR L3 nucleic acid sequence
cagcagcatcataactggcctctcact

SEQ ID NO: 5921 - DNA, 375 bp, Artificial Sequence; identical to SEQ ID NO: 1
  Description of Artificial Sequence: Synthetic Heavy chain variable region nucleic acid sequence

SEQ ID NO: 5922 - protein, 125 aa, Artificial Sequence; identical to SEQ ID NO: 2
  Description of Artificial Sequence: Synthetic Heavy chain variable region amino acid sequence

SEQ ID NO: 5923 - protein, 9 aa, Artificial Sequence
  Description of Artificial Sequence: Synthetic Heavy chain variable region CDR H1 amino acid sequence
FTFNTYAMN

SEQ ID NO: 5924 - DNA, 27 bp, Artificial Sequence
  Description of Artificial Sequence: Synthetic Heavy chain variable region CDR H1 nucleic acid sequence
ttcacctttaacacatatgccatgaat

SEQ ID NO: 5925 - protein, 19 aa, Artificial Sequence
  Description of Artificial Sequence: Synthetic Heavy chain variable region CDR H2 amino acid sequence
RIRSKYNNYATYYADSVKD

SEQ ID NO: 5926 - DNA, 57 bp, Artificial Sequence; identical to SEQ ID NO: 6
  Description of Artificial Sequence: Synthetic Heavy chain variable region CDR H2 nucleic acid sequence

SEQ ID NO: 5927 - protein, 16 aa, Artificial Sequence
  Description of Artificial Sequence: Synthetic Heavy chain variable region CDR H3 amino acid sequence
VRHGNFGNSYVSWFAY

SEQ ID NO: 5928 - DNA, 48 bp, Artificial Sequence; identical to SEQ ID NO: 8
  Description of Artificial Sequence: Synthetic Heavy chain variable region CDR H3 nucleic acid sequence

SEQ ID NO: 5929 - DNA, 327 bp, Artificial Sequence; identical to SEQ ID NO: 9
  Description of Artificial Sequence: Synthetic Light chain variable region nucleic acid sequence

SEQ ID NO: 5930 - protein, 109 aa, Artificial Sequence; identical to SEQ ID NO: 10
  Description of Artificial Sequence: Synthetic Light chain variable region amino acid sequence

SEQ ID NO: 5931 - protein, 14 aa, Artificial Sequence
  Description of Artificial Sequence: Synthetic Light chain variable region CDR L1 amino acid sequence
RSSTGAVTTSNYAN

SEQ ID NO: 5932 - DNA, 42 bp, Artificial Sequence; identical to SEQ ID NO: 12
  Description of Artificial Sequence: Synthetic Light chain variable region CDR L1 nucleic acid sequence

SEQ ID NO: 5933 - protein, 7 aa, Artificial Sequence
  Description of Artificial Sequence: Synthetic Light chain variable region CDR L2 amino acid sequence
GTNKRAP

SEQ ID NO: 5934 - DNA, 21 bp, Artificial Sequence
  Description of Artificial Sequence: Synthetic Light chain variable region CDR L2 nucleic acid sequence
ggcacaaacaagcgcgctcct

SEQ ID NO: 5935 - protein, 9 aa, Artificial Sequence
  Description of Artificial Sequence: Synthetic Light chain variable region CDR L3 amino acid sequence
ALWYSNLWV

SEQ ID NO: 5936 - DNA, 27 bp, Artificial Sequence
  Description of Artificial Sequence: Synthetic Light chain variable region CDR L3 nucleic acid sequence
gcgctgtggtacagtaacctttgggtg

SEQ ID NO: 5937 - DNA, 357 bp, Artificial Sequence
  Description of Artificial Sequence: Synthetic Heavy chain variable region nucleic acid sequence
caggtgcagctggtgcagtctggggctgaggtgaagaagcctggggcctcagtgaaggtctcctgcaaggcttctggattcaacatcaaggactactatatgcactgggtgcgacaggctcctggacaaaggcttgagtggatgggatggatcgaccttgaaaatggtaacacaatctatgacccgaagtttcagggcagggtcaccataaccagggacacgtccgccagcacagcctacatggagctgagcagcctgagatctgaagacacggcggtgtactactgcgcgagagatggatacgctagatattactttgatgtgtggggccaaggaaccctggtcaccgtctcctca

SEQ ID NO: 5938 - protein, 119 aa, Artificial Sequence
  Description of Artificial Sequence: Synthetic Heavy chain variable region amino acid sequence
QVQLVQSGAEVKKPGASVKVSCKASGFNIKDYYMHWVRQAPGQRLEWMGWIDLENGNTIYDPKFQGRVTITRDTSASTAYMELSSLRSEDTAVYYCARDGYARYYFDVWGQGTLVTVSS

SEQ ID NO: 5939 - protein, 9 aa, Artificial Sequence
  Description of Artificial Sequence: Synthetic Heavy chain variable region CDR H1 amino acid sequence
FNIKDYYMH

SEQ ID NO: 5940 - DNA, 27 bp, Artificial Sequence
  Description of Artificial Sequence: Synthetic Heavy chain variable region CDR H1 nucleic acid sequence
ttcaacatcaaggactactatatgcac

SEQ ID NO: 5941 - protein, 17 aa, Artificial Sequence
  Description of Artificial Sequence: Synthetic Heavy chain variable region CDR H2 amino acid sequence
WIDLENGNTIYDPKFQG

SEQ ID NO: 5942 - DNA, 51 bp, Artificial Sequence; identical to SEQ ID NO: 3574
  Description of Artificial Sequence: Synthetic Heavy chain variable region CDR H2 nucleic acid sequence

SEQ ID NO: 5943 - protein, 12 aa, Artificial Sequence
  Description of Artificial Sequence: Synthetic Heavy chain variable region CDR H3 amino acid sequence
ARDGYARYYFDV

SEQ ID NO: 5944 - DNA, 36 bp, Artificial Sequence
  Description of Artificial Sequence: Synthetic Heavy chain variable region CDR H3 nucleic acid sequence
gcgagagatggatacgctagatattactttgatgtg

SEQ ID NO: 5945 - DNA, 336 bp, Artificial Sequence; identical to SEQ ID NO: 3865
  Description of Artificial Sequence: Synthetic Light chain variable region nucleic acid sequence

SEQ ID NO: 5946 - protein, 112 aa, Artificial Sequence; identical to SEQ ID NO: 3866
  Description of Artificial Sequence: Synthetic Light chain variable region amino acid sequence

SEQ ID NO: 5947 - protein, 17 aa, Artificial Sequence
  Description of Artificial Sequence: Synthetic Light chain variable region CDR L1 amino acid sequence
KSSQSLLNSRTGKNYLA

SEQ ID NO: 5948 - DNA, 51 bp, Artificial Sequence; identical to SEQ ID NO: 3868
  Description of Artificial Sequence: Synthetic Light chain variable region CDR L1 nucleic acid sequence

SEQ ID NO: 5949 - protein, 7 aa, Artificial Sequence
  Description of Artificial Sequence: Synthetic Light chain variable region CDR L2 amino acid sequence
WASTRES

SEQ ID NO: 5950 - DNA, 21 bp, Artificial Sequence
  Description of Artificial Sequence: Synthetic Light chain variable region CDR L2 nucleic acid sequence
tgggcatctacccgggaatcc

SEQ ID NO: 5951 - protein, 8 aa, Artificial Sequence
  Description of Artificial Sequence: Synthetic Light chain variable region CDR L3 amino acid sequence
KQSYSRRT

SEQ ID NO: 5952 - DNA, 24 bp, Artificial Sequence
  Description of Artificial Sequence: Synthetic Light chain variable region CDR L3 nucleic acid sequence
aagcaatcttattctcggagaact

SEQ ID NO: 5953 - DNA, 357 bp, Artificial Sequence
  Description of Artificial Sequence: Synthetic Heavy chain variable region nucleic acid sequence
caggtgcagctggtgcagtctggggctgaggtgaagaagcctggggcctcagtgaaggtctcctgcaaggcttctggattcaacatcaaggactactatatgcactgggtgcgacaggctcctggacaaaggcttgagtggatgggatggatcgaccttgaaaatggtaacacaatctatgacccgaagtttcagggcagggtcaccataaccagggacacgtccgccagcacagcctacatggagctgagcagcctgagatctgaagacacggcggtgtactactgcgcgagagatggatacgctagatattactatgactactggggccaaggaaccctggtcaccgtctcctca

SEQ ID NO: 5954 - protein, 119 aa, Artificial Sequence
  Description of Artificial Sequence: Synthetic Heavy chain variable region amino acid sequence
QVQLVQSGAEVKKPGASVKVSCKASGFNIKDYYMHWVRQAPGQRLEWMGWIDLENGNTIYDPKFQGRVTITRDTSASTAYMELSSLRSEDTAVYYCARDGYARYYYDYWGQGTLVTVSS

SEQ ID NO: 5955 - protein, 9 aa, Artificial Sequence
  Description of Artificial Sequence: Synthetic Heavy chain variable region CDR H1 amino acid sequence
FNIKDYYMH

SEQ ID NO: 5956 - DNA, 27 bp, Artificial Sequence
  Description of Artificial Sequence: Synthetic Heavy chain variable region CDR H1 nucleic acid sequence
ttcaacatcaaggactactatatgcac

SEQ ID NO: 5957 - protein, 17 aa, Artificial Sequence
  Description of Artificial Sequence: Synthetic Heavy chain variable region CDR H2 amino acid sequence
WIDLENGNTIYDPKFQG

SEQ ID NO: 5958 - DNA, 51 bp, Artificial Sequence; identical to SEQ ID NO: 3574
  Description of Artificial Sequence: Synthetic Heavy chain variable region CDR H2 nucleic acid sequence

SEQ ID NO: 5959 - protein, 12 aa, Artificial Sequence
  Description of Artificial Sequence: Synthetic Heavy chain variable region CDR H3 amino acid sequence
ARDGYARYYYDY

SEQ ID NO: 5960 - DNA, 36 bp, Artificial Sequence
  Description of Artificial Sequence: Synthetic Heavy chain variable region CDR H3 nucleic acid sequence
gcgagagatggatacgctagatattactatgactac

SEQ ID NO: 5961 - DNA, 336 bp, Artificial Sequence; identical to SEQ ID NO: 3865
  Description of Artificial Sequence: Synthetic Light chain variable region nucleic acid sequence

SEQ ID NO: 5962 - protein, 112 aa, Artificial Sequence; identical to SEQ ID NO: 3866
  Description of Artificial Sequence: Synthetic Light chain variable region amino acid sequence

SEQ ID NO: 5963 - protein, 17 aa, Artificial Sequence
  Description of Artificial Sequence: Synthetic Light chain variable region CDR L1 amino acid sequence
KSSQSLLNSRTGKNYLA

SEQ ID NO: 5964 - DNA, 51 bp, Artificial Sequence; identical to SEQ ID NO: 3868
  Description of Artificial Sequence: Synthetic Light chain variable region CDR L1 nucleic acid sequence

SEQ ID NO: 5965 - protein, 7 aa, Artificial Sequence
  Description of Artificial Sequence: Synthetic Light chain variable region CDR L2 amino acid sequence
WASTRES

SEQ ID NO: 5966 - DNA, 21 bp, Artificial Sequence
  Description of Artificial Sequence: Synthetic Light chain variable region CDR L2 nucleic acid sequence
tgggcatctacccgggaatcc

SEQ ID NO: 5967 - protein, 8 aa, Artificial Sequence
  Description of Artificial Sequence: Synthetic Light chain variable region CDR L3 amino acid sequence
KQSYSRRT

SEQ ID NO: 5968 - DNA, 24 bp, Artificial Sequence
  Description of Artificial Sequence: Synthetic Light chain variable region CDR L3 nucleic acid sequence
aagcaatcttattctcggagaact

SEQ ID NO: 5969 - DNA, 357 bp, Artificial Sequence
  Description of Artificial Sequence: Synthetic Heavy chain variable region nucleic acid sequence
caggtgcagctggtgcagtctggggctgaggtgaagaagcctggggcctcagtgaaggtctcctgcaaggcttctggattcaacatcaaggactactatatgcactgggtgcgacaggctcctggacaaaggcttgagtggatgggatggatcgaccttgaaaatggtaacacaatctatgacccgaagtttcagggcagggtcaccataaccagggacacgtccgccagcacagcctacatggagctgagcagcctgagatctgaagacacggcggtgtactactgcagtagagatggatacgctagatattactttgactactggggccaaggaaccctggtcaccgtctcctca

SEQ ID NO: 5970 - protein, 119 aa, Artificial Sequence
  Description of Artificial Sequence: Synthetic Heavy chain variable region amino acid sequence
QVQLVQSGAEVKKPGASVKVSCKASGFNIKDYYMHWVRQAPGQRLEWMGWIDLENGNTIYDPKFQGRVTITRDTSASTAYMELSSLRSEDTAVYYCSRDGYARYYFDYWGQGTLVTVSS

SEQ ID NO: 5971 - protein, 9 aa, Artificial Sequence
  Description of Artificial Sequence: Synthetic Heavy chain variable region CDR H1 amino acid sequence
FNIKDYYMH

SEQ ID NO: 5972 - DNA, 27 bp, Artificial Sequence
  Description of Artificial Sequence: Synthetic Heavy chain variable region CDR H1 nucleic acid sequence
ttcaacatcaaggactactatatgcac

SEQ ID NO: 5973 - protein, 17 aa, Artificial Sequence
  Description of Artificial Sequence: Synthetic Heavy chain variable region CDR H2 amino acid sequence
WIDLENGNTIYDPKFQG

SEQ ID NO: 5974 - DNA, 51 bp, Artificial Sequence; identical to SEQ ID NO: 3574
  Description of Artificial Sequence: Synthetic Heavy chain variable region CDR H2 nucleic acid sequence

SEQ ID NO: 5975 - protein, 12 aa, Artificial Sequence
  Description of Artificial Sequence: Synthetic Heavy chain variable region CDR H3 amino acid sequence
SRDGYARYYFDY

SEQ ID NO: 5976 - DNA, 36 bp, Artificial Sequence
  Description of Artificial Sequence: Synthetic Heavy chain variable region CDR H3 nucleic acid sequence
agtagagatggatacgctagatattactttgactac

SEQ ID NO: 5977 - DNA, 336 bp, Artificial Sequence; identical to SEQ ID NO: 3865
  Description of Artificial Sequence: Synthetic Light chain variable region nucleic acid sequence

SEQ ID NO: 5978 - protein, 112 aa, Artificial Sequence; identical to SEQ ID NO: 3866
  Description of Artificial Sequence: Synthetic Light chain variable region amino acid sequence

SEQ ID NO: 5979 - protein, 17 aa, Artificial Sequence
  Description of Artificial Sequence: Synthetic Light chain variable region CDR L1 amino acid sequence
KSSQSLLNSRTGKNYLA

SEQ ID NO: 5980 - DNA, 51 bp, Artificial Sequence; identical to SEQ ID NO: 3868
  Description of Artificial Sequence: Synthetic Light chain variable region CDR L1 nucleic acid sequence

SEQ ID NO: 5981 - protein, 7 aa, Artificial Sequence
  Description of Artificial Sequence: Synthetic Light chain variable region CDR L2 amino acid sequence
WASTRES

SEQ ID NO: 5982 - DNA, 21 bp, Artificial Sequence
  Description of Artificial Sequence: Synthetic Light chain variable region CDR L2 nucleic acid sequence
tgggcatctacccgggaatcc

SEQ ID NO: 5983 - protein, 8 aa, Artificial Sequence
  Description of Artificial Sequence: Synthetic Light chain variable region CDR L3 amino acid sequence
KQSYSRRT

SEQ ID NO: 5984 - DNA, 24 bp, Artificial Sequence
  Description of Artificial Sequence: Synthetic Light chain variable region CDR L3 nucleic acid sequence
aagcaatcttattctcggagaact

SEQ ID NO: 5985 - DNA, 357 bp, Artificial Sequence
  Description of Artificial Sequence: Synthetic Heavy chain variable region nucleic acid sequence
caggtgcagctggtgcagtctggggctgaggtgaagaagcctggggcctcagtgaaggtctcctgcaaggcttctggattcaacatcaaggactactatatgcactgggtgcgacaggctcctggacaaaggcttgagtggatgggatggatcgaccttgaaaatggtaacacaatctatgacccgaagtttcagggcagggtcaccataaccagggacacgtccgccagcacagcctacatggagctgagcagcctgagatctgaagacacggcggtgtactactgcaatagagatggatacgctagatattactatgactactggggccaaggaaccctggtcaccgtctcctca

SEQ ID NO: 5986 - protein, 119 aa, Artificial Sequence
  Description of Artificial Sequence: Synthetic Heavy chain variable region amino acid sequence
QVQLVQSGAEVKKPGASVKVSCKASGFNIKDYYMHWVRQAPGQRLEWMGWIDLENGNTIYDPKFQGRVTITRDTSASTAYMELSSLRSEDTAVYYCNRDGYARYYYDYWGQGTLVTVSS

SEQ ID NO: 5987 - protein, 9 aa, Artificial Sequence
  Description of Artificial Sequence: Synthetic Heavy chain variable region CDR H1 amino acid sequence
FNIKDYYMH

SEQ ID NO: 5988 - DNA, 27 bp, Artificial Sequence
  Description of Artificial Sequence: Synthetic Heavy chain variable region CDR H1 nucleic acid sequence
ttcaacatcaaggactactatatgcac

SEQ ID NO: 5989 - protein, 17 aa, Artificial Sequence
  Description of Artificial Sequence: Synthetic Heavy chain variable region CDR H2 amino acid sequence
WIDLENGNTIYDPKFQG

SEQ ID NO: 5990 - DNA, 51 bp, Artificial Sequence; identical to SEQ ID NO: 3574
  Description of Artificial Sequence: Synthetic Heavy chain variable region CDR H2 nucleic acid sequence

SEQ ID NO: 5991 - protein, 12 aa, Artificial Sequence
  Description of Artificial Sequence: Synthetic Heavy chain variable region CDR H3 amino acid sequence
NRDGYARYYYDY

SEQ ID NO: 5992 - DNA, 36 bp, Artificial Sequence
  Description of Artificial Sequence: Synthetic Heavy chain variable region CDR H3 nucleic acid sequence
aatagagatggatacgctagatattactatgactac

SEQ ID NO: 5993 - DNA, 336 bp, Artificial Sequence; identical to SEQ ID NO: 3865
  Description of Artificial Sequence: Synthetic Light chain variable region nucleic acid sequence

SEQ ID NO: 5994 - protein, 112 aa, Artificial Sequence; identical to SEQ ID NO: 3866
  Description of Artificial Sequence: Synthetic Light chain variable region amino acid sequence

SEQ ID NO: 5995 - protein, 17 aa, Artificial Sequence
  Description of Artificial Sequence: Synthetic Light chain variable region CDR L1 amino acid sequence
KSSQSLLNSRTGKNYLA

SEQ ID NO: 5996 - DNA, 51 bp, Artificial Sequence; identical to SEQ ID NO: 3868
  Description of Artificial Sequence: Synthetic Light chain variable region CDR L1 nucleic acid sequence

SEQ ID NO: 5997 - protein, 7 aa, Artificial Sequence
  Description of Artificial Sequence: Synthetic Light chain variable region CDR L2 amino acid sequence
WASTRES

SEQ ID NO: 5998 - DNA, 21 bp, Artificial Sequence
  Description of Artificial Sequence: Synthetic Light chain variable region CDR L2 nucleic acid sequence
tgggcatctacccgggaatcc

SEQ ID NO: 5999 - protein, 8 aa, Artificial Sequence
  Description of Artificial Sequence: Synthetic Light chain variable region CDR L3 amino acid sequence
KQSYSRRT

SEQ ID NO: 6000 - DNA, 24 bp, Artificial Sequence
  Description of Artificial Sequence: Synthetic Light chain variable region CDR L3 nucleic acid sequence
aagcaatcttattctcggagaact

SEQ ID NO: 6001 - DNA, 357 bp, Artificial Sequence
  Description of Artificial Sequence: Synthetic Heavy chain variable region nucleic acid sequence
caggtgcagctggtgcagtctggggctgaggtgaagaagcctggggcctcagtgaaggtctcctgcaaggcttctggattcaacatcaaggactactatatgcactgggtgcgacaggctcctggacaaaggcttgagtggatgggatggatcgaccttgaaaatggtaacacaatctatgacccgaagtttcagggcagggtcaccataaccagggacacgtccgccagcacagcctacatggagctgagcagcctgagatctgaagacacggcggtgtactactgcgcgagagatggatacgctagatatttttttgacaattggggccaaggaaccctggtcaccgtctcctca

SEQ ID NO: 6002 - protein, 119 aa, Artificial Sequence
  Description of Artificial Sequence: Synthetic Heavy chain variable region amino acid sequence
QVQLVQSGAEVKKPGASVKVSCKASGFNIKDYYMHWVRQAPGQRLEWMGWIDLENGNTIYDPKFQGRVTITRDTSASTAYMELSSLRSEDTAVYYCARDGYARYFFDNWGQGTLVTVSS

SEQ ID NO: 6003 - protein, 9 aa, Artificial Sequence
  Description of Artificial Sequence: Synthetic Heavy chain variable region CDR H1 amino acid sequence
FNIKDYYMH

SEQ ID NO: 6004 - DNA, 27 bp, Artificial Sequence
  Description of Artificial Sequence: Synthetic Heavy chain variable region CDR H1 nucleic acid sequence
ttcaacatcaaggactactatatgcac

SEQ ID NO: 6005 - protein, 17 aa, Artificial Sequence
  Description of Artificial Sequence: Synthetic Heavy chain variable region CDR H2 amino acid sequence
WIDLENGNTIYDPKFQG

SEQ ID NO: 6006 - DNA, 51 bp, Artificial Sequence; identical to SEQ ID NO: 3574
  Description of Artificial Sequence: Synthetic Heavy chain variable region CDR H2 nucleic acid sequence

SEQ ID NO: 6007 - protein, 12 aa, Artificial Sequence
  Description of Artificial Sequence: Synthetic Heavy chain variable region CDR H3 amino acid sequence
ARDGYARYFFDN

SEQ ID NO: 6008 - DNA, 36 bp, Artificial Sequence
  Description of Artificial Sequence: Synthetic Heavy chain variable region CDR H3 nucleic acid sequence
gcgagagatggatacgctagatatttttttgacaat

SEQ ID NO: 6009 - DNA, 336 bp, Artificial Sequence; identical to SEQ ID NO: 3865
  Description of Artificial Sequence: Synthetic Light chain variable region nucleic acid sequence

SEQ ID NO: 6010 - protein, 112 aa, Artificial Sequence; identical to SEQ ID NO: 3866
  Description of Artificial Sequence: Synthetic Light chain variable region amino acid sequence

SEQ ID NO: 6011 - protein, 17 aa, Artificial Sequence
  Description of Artificial Sequence: Synthetic Light chain variable region CDR L1 amino acid sequence
KSSQSLLNSRTGKNYLA

SEQ ID NO: 6012 - DNA, 51 bp, Artificial Sequence; identical to SEQ ID NO: 3868
  Description of Artificial Sequence: Synthetic Light chain variable region CDR L1 nucleic acid sequence

SEQ ID NO: 6013 - protein, 7 aa, Artificial Sequence
  Description of Artificial Sequence: Synthetic Light chain variable region CDR L2 amino acid sequence
WASTRES

SEQ ID NO: 6014 - DNA, 21 bp, Artificial Sequence
  Description of Artificial Sequence: Synthetic Light chain variable region CDR L2 nucleic acid sequence
tgggcatctacccgggaatcc

SEQ ID NO: 6015 - protein, 8 aa, Artificial Sequence
  Description of Artificial Sequence: Synthetic Light chain variable region CDR L3 amino acid sequence
KQSYSRRT

SEQ ID NO: 6016 - DNA, 24 bp, Artificial Sequence
  Description of Artificial Sequence: Synthetic Light chain variable region CDR L3 nucleic acid sequence
aagcaatcttattctcggagaact

SEQ ID NO: 6017 - DNA, 357 bp, Artificial Sequence
  Description of Artificial Sequence: Synthetic Heavy chain variable region nucleic acid sequence
caggtgcagctggtgcagtctggggctgaggtgaagaagcctggggcctcagtgaaggtctcctgcaaggcttctggattcaacatcaaggactactatatgcactgggtgcgacaggctcctggacaaaggcttgagtggatgggatggatcgaccttgaaaatggtaacacaatctatgacccgaagtttcagggcagggtcaccataaccagggacacgtccgccagcacagcctacatggagctgagcagcctgagatctgaagacacggcggtgtactactgcgcgagagatgggtacgggagatattactttgaccgttggggccaaggaaccctggtcaccgtctcctca

SEQ ID NO: 6018 - protein, 119 aa, Artificial Sequence
  Description of Artificial Sequence: Synthetic Heavy chain variable region amino acid sequence
QVQLVQSGAEVKKPGASVKVSCKASGFNIKDYYMHWVRQAPGQRLEWMGWIDLENGNTIYDPKFQGRVTITRDTSASTAYMELSSLRSEDTAVYYCARDGYGRYYFDRWGQGTLVTVSS

SEQ ID NO: 6019 - protein, 9 aa, Artificial Sequence
  Description of Artificial Sequence: Synthetic Heavy chain variable region CDR H1 amino acid sequence
FNIKDYYMH

SEQ ID NO: 6020 - DNA, 27 bp, Artificial Sequence
  Description of Artificial Sequence: Synthetic Heavy chain variable region CDR H1 nucleic acid sequence
ttcaacatcaaggactactatatgcac

SEQ ID NO: 6021 - protein, 17 aa, Artificial Sequence
  Description of Artificial Sequence: Synthetic Heavy chain variable region CDR H2 amino acid sequence
WIDLENGNTIYDPKFQG

SEQ ID NO: 6022 - DNA, 51 bp, Artificial Sequence; identical to SEQ ID NO: 3574
  Description of Artificial Sequence: Synthetic Heavy chain variable region CDR H2 nucleic acid sequence

SEQ ID NO: 6023 - protein, 12 aa, Artificial Sequence
  Description of Artificial Sequence: Synthetic Heavy chain variable region CDR H3 amino acid sequence
ARDGYGRYYFDR

SEQ ID NO: 6024 - DNA, 36 bp, Artificial Sequence
  Description of Artificial Sequence: Synthetic Heavy chain variable region CDR H3 nucleic acid sequence
gcgagagatgggtacgggagatattactttgaccgt

SEQ ID NO: 6025 - DNA, 336 bp, Artificial Sequence
  Description of Artificial Sequence: Synthetic Light chain variable region nucleic acid sequence
gacatcgtgatgacccagtctccagactccctggctgtgtctctgggcgagagggccaccatcaactgcaagtccagccagagtcttttaaacagcagaaccggaaagaactacttagcttggtaccagcagaaaccaggacagccccctaagctgctcatttactgggcatctacccgggaatccggggtccctgaccgattcagtggcagcgggtctgggacagacttcactctcactatcagtagcctgcaggctgaagatgtggcagtttattactgtaagcaatcttattctcggagaactttcggcggagggaccaaggtcgagatcaaa

SEQ ID NO: 6026 - protein, 112 aa, Artificial Sequence; identical to SEQ ID NO: 3866
  Description of Artificial Sequence: Synthetic Light chain variable region amino acid sequence

SEQ ID NO: 6027 - protein, 17 aa, Artificial Sequence
  Description of Artificial Sequence: Synthetic Light chain variable region CDR L1 amino acid sequence
KSSQSLLNSRTGKNYLA

SEQ ID NO: 6028 - DNA, 51 bp, Artificial Sequence; identical to SEQ ID NO: 3868
  Description of Artificial Sequence: Synthetic Light chain variable region CDR L1 nucleic acid sequence

SEQ ID NO: 6029 - protein, 7 aa, Artificial Sequence
  Description of Artificial Sequence: Synthetic Light chain variable region CDR L2 amino acid sequence
WASTRES

SEQ ID NO: 6030 - DNA, 21 bp, Artificial Sequence
  Description of Artificial Sequence: Synthetic Light chain variable region CDR L2 nucleic acid sequence
tgggcatctacccgggaatcc

SEQ ID NO: 6031 - protein, 8 aa, Artificial Sequence
  Description of Artificial Sequence: Synthetic Light chain variable region CDR L3 amino acid sequence
KQSYSRRT

SEQ ID NO: 6032 - DNA, 24 bp, Artificial Sequence
  Description of Artificial Sequence: Synthetic Light chain variable region CDR L3 nucleic acid sequence
aagcaatcttattctcggagaact

SEQ ID NO: 6033 - DNA, 357 bp, Artificial Sequence
  Description of Artificial Sequence: Synthetic Heavy chain variable region nucleic acid sequence
caggtgcagctggtgcagtctggggctgaggtgaagaagcctggggcctcagtgaaggtctcctgcaaggcttctggattcaacatcaaggactactatatgcactgggtgcgacaggctcctggacaaaggcttgagtggatgggatggatcgaccttgaaaatggtaacacaatctatgacccgaagtttcagggcagggtcaccataaccagggacacgtccgccagcacagcctacatggagctgagcagcctgagatctgaagacacggcggtgtactactgcgggtcggatggatacgctagatattactttgactactggggccaaggaaccctggtcaccgtctcctca

SEQ ID NO: 6034 - protein, 119 aa, Artificial Sequence
  Description of Artificial Sequence: Synthetic Heavy chain variable region amino acid sequence
QVQLVQSGAEVKKPGASVKVSCKASGFNIKDYYMHWVRQAPGQRLEWMGWIDLENGNTIYDPKFQGRVTITRDTSASTAYMELSSLRSEDTAVYYCGSDGYARYYFDYWGQGTLVTVSS

SEQ ID NO: 6035 - protein, 9 aa, Artificial Sequence
  Description of Artificial Sequence: Synthetic Heavy chain variable region CDR H1 amino acid sequence
FNIKDYYMH

SEQ ID NO: 6036 - DNA, 27 bp, Artificial Sequence
  Description of Artificial Sequence: Synthetic Heavy chain variable region CDR H1 nucleic acid sequence
ttcaacatcaaggactactatatgcac

SEQ ID NO: 6037 - protein, 17 aa, Artificial Sequence
  Description of Artificial Sequence: Synthetic Heavy chain variable region CDR H2 amino acid sequence
WIDLENGNTIYDPKFQG

SEQ ID NO: 6038 - DNA, 51 bp, Artificial Sequence; identical to SEQ ID NO: 3574
  Description of Artificial Sequence: Synthetic Heavy chain variable region CDR H2 nucleic acid sequence

SEQ ID NO: 6039 - protein, 12 aa, Artificial Sequence
  Description of Artificial Sequence: Synthetic Heavy chain variable region CDR H3 amino acid sequence
GSDGYARYYFDY

SEQ ID NO: 6040 - DNA, 36 bp, Artificial Sequence
  Description of Artificial Sequence: Synthetic Heavy chain variable region CDR H3 nucleic acid sequence
gggtcggatggatacgctagatattactttgactac

SEQ ID NO: 6041 - DNA, 336 bp, Artificial Sequence; identical to SEQ ID NO: 3865
  Description of Artificial Sequence: Synthetic Light chain variable region nucleic acid sequence

SEQ ID NO: 6042 - protein, 112 aa, Artificial Sequence; identical to SEQ ID NO: 3866
  Description of Artificial Sequence: Synthetic Light chain variable region amino acid sequence

SEQ ID NO: 6043 - protein, 17 aa, Artificial Sequence
  Description of Artificial Sequence: Synthetic Light chain variable region CDR L1 amino acid sequence
KSSQSLLNSRTGKNYLA

SEQ ID NO: 6044 - DNA, 51 bp, Artificial Sequence; identical to SEQ ID NO: 3868
  Description of Artificial Sequence: Synthetic Light chain variable region CDR L1 nucleic acid sequence

SEQ ID NO: 6045 - protein, 7 aa, Artificial Sequence
  Description of Artificial Sequence: Synthetic Light chain variable region CDR L2 amino acid sequence
WASTRES

SEQ ID NO: 6046 - DNA, 21 bp, Artificial Sequence
  Description of Artificial Sequence: Synthetic Light chain variable region CDR L2 nucleic acid sequence
tgggcatctacccgggaatcc

SEQ ID NO: 6047 - protein, 8 aa, Artificial Sequence
  Description of Artificial Sequence: Synthetic Light chain variable region CDR L3 amino acid sequence
KQSYSRRT

SEQ ID NO: 6048 - DNA, 24 bp, Artificial Sequence
  Description of Artificial Sequence: Synthetic Light chain variable region CDR L3 nucleic acid sequence
aagcaatcttattctcggagaact

SEQ ID NO: 6049 - DNA, 357 bp, Artificial Sequence; identical to SEQ ID NO: 5201
  Description of Artificial Sequence: Synthetic Heavy chain variable region nucleic acid sequence

SEQ ID NO: 6050 - protein, 119 aa, Artificial Sequence; identical to SEQ ID NO: 5202
  Description of Artificial Sequence: Synthetic Heavy chain variable region amino acid sequence

SEQ ID NO: 6051 - protein, 9 aa, Artificial Sequence
  Description of Artificial Sequence: Synthetic Heavy chain variable region CDR H1 amino acid sequence
FNIKDYYMH

SEQ ID NO: 6052 - DNA, 27 bp, Artificial Sequence
  Description of Artificial Sequence: Synthetic Heavy chain variable region CDR H1 nucleic acid sequence
ttcaacatcaaggactactatatgcac

SEQ ID NO: 6053 - protein, 17 aa, Artificial Sequence
  Description of Artificial Sequence: Synthetic Heavy chain variable region CDR H2 amino acid sequence
WIDLENANTIYDAKFQG

SEQ ID NO: 6054 - DNA, 51 bp, Artificial Sequence; identical to SEQ ID NO: 4662
  Description of Artificial Sequence: Synthetic Heavy chain variable region CDR H2 nucleic acid sequence

SEQ ID NO: 6055 - protein, 12 aa, Artificial Sequence
  Description of Artificial Sequence: Synthetic Heavy chain variable region CDR H3 amino acid sequence
GRDAYGRYFYDV

SEQ ID NO: 6056 - DNA, 36 bp, Artificial Sequence; identical to SEQ ID NO: 5208
  Description of Artificial Sequence: Synthetic Heavy chain variable region CDR H3 nucleic acid sequence

SEQ ID NO: 6057 - DNA, 336 bp, Artificial Sequence; identical to SEQ ID NO: 4537
  Description of Artificial Sequence: Synthetic Light chain variable region nucleic acid sequence

SEQ ID NO: 6058 - protein, 112 aa, Artificial Sequence; identical to SEQ ID NO: 4538
  Description of Artificial Sequence: Synthetic Light chain variable region amino acid sequence

SEQ ID NO: 6059 - protein, 17 aa, Artificial Sequence
  Description of Artificial Sequence: Synthetic Light chain variable region CDR L1 amino acid sequence
KSSQSLLNARTGKNYLA

SEQ ID NO: 6060 - DNA, 51 bp, Artificial Sequence; identical to SEQ ID NO: 4540
  Description of Artificial Sequence: Synthetic Light chain variable region CDR L1 nucleic acid sequence

SEQ ID NO: 6061 - protein, 7 aa, Artificial Sequence
  Description of Artificial Sequence: Synthetic Light chain variable region CDR L2 amino acid sequence
WASTRES

SEQ ID NO: 6062 - DNA, 21 bp, Artificial Sequence
  Description of Artificial Sequence: Synthetic Light chain variable region CDR L2 nucleic acid sequence
tgggcatctacccgggaatcc

SEQ ID NO: 6063 - protein, 8 aa, Artificial Sequence
  Description of Artificial Sequence: Synthetic Light chain variable region CDR L3 amino acid sequence
KQSYSRRT

SEQ ID NO: 6064 - DNA, 24 bp, Artificial Sequence
  Description of Artificial Sequence: Synthetic Light chain variable region CDR L3 nucleic acid sequence
aagcaatcttattctcggagaact

SEQ ID NO: 6065 - DNA, 357 bp, Artificial Sequence; identical to SEQ ID NO: 5265
  Description of Artificial Sequence: Synthetic Heavy chain variable region nucleic acid sequence

SEQ ID NO: 6066 - protein, 119 aa, Artificial Sequence; identical to SEQ ID NO: 5266
  Description of Artificial Sequence: Synthetic Heavy chain variable region amino acid sequence

SEQ ID NO: 6067 - protein, 9 aa, Artificial Sequence
  Description of Artificial Sequence: Synthetic Heavy chain variable region CDR H1 amino acid sequence
FNIKDYYMH

SEQ ID NO: 6068 - DNA, 27 bp, Artificial Sequence
  Description of Artificial Sequence: Synthetic Heavy chain variable region CDR H1 nucleic acid sequence
ttcaacatcaaggactactatatgcac

SEQ ID NO: 6069 - protein, 17 aa, Artificial Sequence
  Description of Artificial Sequence: Synthetic Heavy chain variable region CDR H2 amino acid sequence
WIDLENANTIYDAKFQG

SEQ ID NO: 6070 - DNA, 51 bp, Artificial Sequence; identical to SEQ ID NO: 4662
  Description of Artificial Sequence: Synthetic Heavy chain variable region CDR H2 nucleic acid sequence

SEQ ID NO: 6071 - protein, 12 aa, Artificial Sequence
  Description of Artificial Sequence: Synthetic Heavy chain variable region CDR H3 amino acid sequence
ARDVLGRYFYDV

SEQ ID NO: 6072 - DNA, 36 bp, Artificial Sequence; identical to SEQ ID NO: 5272
  Description of Artificial Sequence: Synthetic Heavy chain variable region CDR H3 nucleic acid sequence

SEQ ID NO: 6073 - DNA, 336 bp, Artificial Sequence; identical to SEQ ID NO: 4537
  Description of Artificial Sequence: Synthetic Light chain variable region nucleic acid sequence

SEQ ID NO: 6074 - protein, 112 aa, Artificial Sequence; identical to SEQ ID NO: 4538
  Description of Artificial Sequence: Synthetic Light chain variable region amino acid sequence

SEQ ID NO: 6075 - protein, 17 aa, Artificial Sequence
  Description of Artificial Sequence: Synthetic Light chain variable region CDR L1 amino acid sequence
KSSQSLLNARTGKNYLA

SEQ ID NO: 6076 - DNA, 51 bp, Artificial Sequence; identical to SEQ ID NO: 4540
  Description of Artificial Sequence: Synthetic Light chain variable region CDR L1 nucleic acid sequence

SEQ ID NO: 6077 - protein, 7 aa, Artificial Sequence
  Description of Artificial Sequence: Synthetic Light chain variable region CDR L2 amino acid sequence
WASTRES

SEQ ID NO: 6078 - DNA, 21 bp, Artificial Sequence
  Description of Artificial Sequence: Synthetic Light chain variable region CDR L2 nucleic acid sequence
tgggcatctacccgggaatcc

SEQ ID NO: 6079 - protein, 8 aa, Artificial Sequence
  Description of Artificial Sequence: Synthetic Light chain variable region CDR L3 amino acid sequence
KQSYSRRT

SEQ ID NO: 6080 - DNA, 24 bp, Artificial Sequence
  Description of Artificial Sequence: Synthetic Light chain variable region CDR L3 nucleic acid sequence
aagcaatcttattctcggagaact

SEQ ID NO: 6081 - DNA, 357 bp, Artificial Sequence; identical to SEQ ID NO: 5281
  Description of Artificial Sequence: Synthetic Heavy chain variable region nucleic acid sequence

SEQ ID NO: 6082 - protein, 119 aa, Artificial Sequence; identical to SEQ ID NO: 5282
  Description of Artificial Sequence: Synthetic Heavy chain variable region amino acid sequence

SEQ ID NO: 6083 - protein, 9 aa, Artificial Sequence
  Description of Artificial Sequence: Synthetic Heavy chain variable region CDR H1 amino acid sequence
FNIKDYYMH

SEQ ID NO: 6084 - DNA, 27 bp, Artificial Sequence
  Description of Artificial Sequence: Synthetic Heavy chain variable region CDR H1 nucleic acid sequence
ttcaacatcaaggactactatatgcac

SEQ ID NO: 6085 - protein, 17 aa, Artificial Sequence
  Description of Artificial Sequence: Synthetic Heavy chain variable region CDR H2 amino acid sequence
WIDLENANTIYDAKFQG

SEQ ID NO: 6086 - DNA, 51 bp, Artificial Sequence; identical to SEQ ID NO: 4662
  Description of Artificial Sequence: Synthetic Heavy chain variable region CDR H2 nucleic acid sequence

SEQ ID NO: 6087 - protein, 12 aa, Artificial Sequence
  Description of Artificial Sequence: Synthetic Heavy chain variable region CDR H3 amino acid sequence
ARDQYGRYFYDV

SEQ ID NO: 6088 - DNA, 36 bp, Artificial Sequence; identical to SEQ ID NO: 5288
  Description of Artificial Sequence: Synthetic Heavy chain variable region CDR H3 nucleic acid sequence

SEQ ID NO: 6089 - DNA, 336 bp, Artificial Sequence; identical to SEQ ID NO: 4537
  Description of Artificial Sequence: Synthetic Light chain variable region nucleic acid sequence

SEQ ID NO: 6090 - protein, 112 aa, Artificial Sequence; identical to SEQ ID NO: 4538
  Description of Artificial Sequence: Synthetic Light chain variable region amino acid sequence

SEQ ID NO: 6091 - protein, 17 aa, Artificial Sequence
  Description of Artificial Sequence: Synthetic Light chain variable region CDR L1 amino acid sequence
KSSQSLLNARTGKNYLA

SEQ ID NO: 6092 - DNA, 51 bp, Artificial Sequence; identical to SEQ ID NO: 4540
  Description of Artificial Sequence: Synthetic Light chain variable region CDR L1 nucleic acid sequence

SEQ ID NO: 6093 - protein, 7 aa, Artificial Sequence
  Description of Artificial Sequence: Synthetic Light chain variable region CDR L2 amino acid sequence
WASTRES

SEQ ID NO: 6094 - DNA, 21 bp, Artificial Sequence
  Description of Artificial Sequence: Synthetic Light chain variable region CDR L2 nucleic acid sequence
tgggcatctacccgggaatcc

SEQ ID NO: 6095 - protein, 8 aa, Artificial Sequence
  Description of Artificial Sequence: Synthetic Light chain variable region CDR L3 amino acid sequence
KQSYSRRT

SEQ ID NO: 6096 - DNA, 24 bp, Artificial Sequence
  Description of Artificial Sequence: Synthetic Light chain variable region CDR L3 nucleic acid sequence
aagcaatcttattctcggagaact

SEQ ID NO: 6097 - DNA, 357 bp, Artificial Sequence; identical to SEQ ID NO: 5313
  Description of Artificial Sequence: Synthetic Heavy chain variable region nucleic acid sequence

SEQ ID NO: 6098 - protein, 119 aa, Artificial Sequence; identical to SEQ ID NO: 5314
  Description of Artificial Sequence: Synthetic Heavy chain variable region amino acid sequence

SEQ ID NO: 6099 - protein, 9 aa, Artificial Sequence
  Description of Artificial Sequence: Synthetic Heavy chain variable region CDR H1 amino acid sequence
FNIKDYYMH

SEQ ID NO: 6100 - DNA, 27 bp, Artificial Sequence
  Description of Artificial Sequence: Synthetic Heavy chain variable region CDR H1 nucleic acid sequence
ttcaacatcaaggactactatatgcac

SEQ ID NO: 6101 - protein, 17 aa, Artificial Sequence
  Description of Artificial Sequence: Synthetic Heavy chain variable region CDR H2 amino acid sequence
WIDLENANTIYDAKFQG

SEQ ID NO: 6102 - DNA, 51 bp, Artificial Sequence; identical to SEQ ID NO: 4662
  Description of Artificial Sequence: Synthetic Heavy chain variable region CDR H2 nucleic acid sequence

SEQ ID NO: 6103 - protein, 12 aa, Artificial Sequence
  Description of Artificial Sequence: Synthetic Heavy chain variable region CDR H3 amino acid sequence
ARDVYGRYFYDL

SEQ ID NO: 6104 - DNA, 36 bp, Artificial Sequence; identical to SEQ ID NO: 5320
  Description of Artificial Sequence: Synthetic Heavy chain variable region CDR H3 nucleic acid sequence

SEQ ID NO: 6105 - DNA, 336 bp, Artificial Sequence; identical to SEQ ID NO: 4537
  Description of Artificial Sequence: Synthetic Light chain variable region nucleic acid sequence

SEQ ID NO: 6106 - protein, 112 aa, Artificial Sequence; identical to SEQ ID NO: 4538
  Description of Artificial Sequence: Synthetic Light chain variable region amino acid sequence

SEQ ID NO: 6107 - protein, 17 aa, Artificial Sequence
  Description of Artificial Sequence: Synthetic Light chain variable region CDR L1 amino acid sequence
KSSQSLLNARTGKNYLA

SEQ ID NO: 6108 - DNA, 51 bp, Artificial Sequence; identical to SEQ ID NO: 4540
  Description of Artificial Sequence: Synthetic Light chain variable region CDR L1 nucleic acid sequence

SEQ ID NO: 6109 - protein, 7 aa, Artificial Sequence
  Description of Artificial Sequence: Synthetic Light chain variable region CDR L2 amino acid sequence
WASTRES

SEQ ID NO: 6110 - DNA, 21 bp, Artificial Sequence
  Description of Artificial Sequence: Synthetic Light chain variable region CDR L2 nucleic acid sequence
tgggcatctacccgggaatcc

SEQ ID NO: 6111 - protein, 8 aa, Artificial Sequence
  Description of Artificial Sequence: Synthetic Light chain variable region CDR L3 amino acid sequence
KQSYSRRT

SEQ ID NO: 6112 - DNA, 24 bp, Artificial Sequence
  Description of Artificial Sequence: Synthetic Light chain variable region CDR L3 nucleic acid sequence
aagcaatcttattctcggagaact

SEQ ID NO: 6113 - DNA, 357 bp, Artificial Sequence; identical to SEQ ID NO: 5329
  Description of Artificial Sequence: Synthetic Heavy chain variable region nucleic acid sequence

SEQ ID NO: 6114 - protein, 119 aa, Artificial Sequence; identical to SEQ ID NO: 5330
  Description of Artificial Sequence: Synthetic Heavy chain variable region amino acid sequence

SEQ ID NO: 6115 - protein, 9 aa, Artificial Sequence
  Description of Artificial Sequence: Synthetic Heavy chain variable region CDR H1 amino acid sequence
FNIKDYYMH

SEQ ID NO: 6116 - DNA, 27 bp, Artificial Sequence
  Description of Artificial Sequence: Synthetic Heavy chain variable region CDR H1 nucleic acid sequence
ttcaacatcaaggactactatatgcac

SEQ ID NO: 6117 - protein, 17 aa, Artificial Sequence
  Description of Artificial Sequence: Synthetic Heavy chain variable region CDR H2 amino acid sequence
WIDLENANTIYDAKFQG

SEQ ID NO: 6118 - DNA, 51 bp, Artificial Sequence; identical to SEQ ID NO: 4662
  Description of Artificial Sequence: Synthetic Heavy chain variable region CDR H2 nucleic acid sequence

SEQ ID NO: 6119 - protein, 12 aa, Artificial Sequence
  Description of Artificial Sequence: Synthetic Heavy chain variable region CDR H3 amino acid sequence
ARDAYGGYFYDV

SEQ ID NO: 6120 - DNA, 36 bp, Artificial Sequence; identical to SEQ ID NO: 5336
  Description of Artificial Sequence: Synthetic Heavy chain variable region CDR H3 nucleic acid sequence

SEQ ID NO: 6121 - DNA, 336 bp, Artificial Sequence; identical to SEQ ID NO: 4537
  Description of Artificial Sequence: Synthetic Light chain variable region nucleic acid sequence

SEQ ID NO: 6122 - protein, 112 aa, Artificial Sequence; identical to SEQ ID NO: 4538
  Description of Artificial Sequence: Synthetic Light chain variable region amino acid sequence

SEQ ID NO: 6123 - protein, 17 aa, Artificial Sequence
  Description of Artificial Sequence: Synthetic Light chain variable region CDR L1 amino acid sequence
KSSQSLLNARTGKNYLA

SEQ ID NO: 6124 - DNA, 51 bp, Artificial Sequence; identical to SEQ ID NO: 4540
  Description of Artificial Sequence: Synthetic Light chain variable region CDR L1 nucleic acid sequence

SEQ ID NO: 6125 - protein, 7 aa, Artificial Sequence
  Description of Artificial Sequence: Synthetic Light chain variable region CDR L2 amino acid sequence
WASTRES

SEQ ID NO: 6126 - DNA, 21 bp, Artificial Sequence
  Description of Artificial Sequence: Synthetic Light chain variable region CDR L2 nucleic acid sequence
tgggcatctacccgggaatcc

SEQ ID NO: 6127 - protein, 8 aa, Artificial Sequence
  Description of Artificial Sequence: Synthetic Light chain variable region CDR L3 amino acid sequence
KQSYSRRT

SEQ ID NO: 6128 - DNA, 24 bp, Artificial Sequence
  Description of Artificial Sequence: Synthetic Light chain variable region CDR L3 nucleic acid sequence
aagcaatcttattctcggagaact

SEQ ID NO: 6129 - DNA, 357 bp, Artificial Sequence; identical to SEQ ID NO: 5345
  Description of Artificial Sequence: Synthetic Heavy chain variable region nucleic acid sequence

SEQ ID NO: 6130 - protein, 119 aa, Artificial Sequence; identical to SEQ ID NO: 5346
  Description of Artificial Sequence: Synthetic Heavy chain variable region amino acid sequence

SEQ ID NO: 6131 - protein, 9 aa, Artificial Sequence
  Description of Artificial Sequence: Synthetic Heavy chain variable region CDR H1 amino acid sequence
FNIKDYYMH

SEQ ID NO: 6132 - DNA, 27 bp, Artificial Sequence
  Description of Artificial Sequence: Synthetic Heavy chain variable region CDR H1 nucleic acid sequence
ttcaacatcaaggactactatatgcac

SEQ ID NO: 6133 - protein, 17 aa, Artificial Sequence
  Description of Artificial Sequence: Synthetic Heavy chain variable region CDR H2 amino acid sequence
WIDLENANTIYDAKFQG

SEQ ID NO: 6134 - DNA, 51 bp, Artificial Sequence; identical to SEQ ID NO: 4662
  Description of Artificial Sequence: Synthetic Heavy chain variable region CDR H2 nucleic acid sequence

SEQ ID NO: 6135 - protein, 12 aa, Artificial Sequence
  Description of Artificial Sequence: Synthetic Heavy chain variable region CDR H3 amino acid sequence
ARDNYGGYFYDV

SEQ ID NO: 6136 - DNA, 36 bp, Artificial Sequence; identical to SEQ ID NO: 5352
  Description of Artificial Sequence: Synthetic Heavy chain variable region CDR H3 nucleic acid sequence

SEQ ID NO: 6137 - DNA, 336 bp, Artificial Sequence; identical to SEQ ID NO: 4537
  Description of Artificial Sequence: Synthetic Light chain variable region nucleic acid sequence

SEQ ID NO: 6138 - protein, 112 aa, Artificial Sequence; identical to SEQ ID NO: 4538
  Description of Artificial Sequence: Synthetic Light chain variable region amino acid sequence

SEQ ID NO: 6139 - protein, 17 aa, Artificial Sequence
  Description of Artificial Sequence: Synthetic Light chain variable region CDR L1 amino acid sequence
KSSQSLLNARTGKNYLA

SEQ ID NO: 6140 - DNA, 51 bp, Artificial Sequence; identical to SEQ ID NO: 4540
  Description of Artificial Sequence: Synthetic Light chain variable region CDR L1 nucleic acid sequence

SEQ ID NO: 6141 - protein, 7 aa, Artificial Sequence
  Description of Artificial Sequence: Synthetic Light chain variable region CDR L2 amino acid sequence
WASTRES

SEQ ID NO: 6142 - DNA, 21 bp, Artificial Sequence
  Description of Artificial Sequence: Synthetic Light chain variable region CDR L2 nucleic acid sequence
tgggcatctacccgggaatcc

SEQ ID NO: 6143 - protein, 8 aa, Artificial Sequence
  Description of Artificial Sequence: Synthetic Light chain variable region CDR L3 amino acid sequence
KQSYSRRT

SEQ ID NO: 6144 - DNA, 24 bp, Artificial Sequence
  Description of Artificial Sequence: Synthetic Light chain variable region CDR L3 nucleic acid sequence
aagcaatcttattctcggagaact

SEQ ID NO: 6145 - DNA, 375 bp, Artificial Sequence; identical to SEQ ID NO: 1
  Description of Artificial Sequence: Synthetic Heavy chain variable region nucleic acid sequence

SEQ ID NO: 6146 - protein, 125 aa, Artificial Sequence; identical to SEQ ID NO: 2
  Description of Artificial Sequence: Synthetic Heavy chain variable region amino acid sequence

SEQ ID NO: 6147 - protein, 9 aa, Artificial Sequence
  Description of Artificial Sequence: Synthetic Heavy chain variable region CDR H1 amino acid sequence
FTFNTYAMN

SEQ ID NO: 6148 - DNA, 27 bp, Artificial Sequence
  Description of Artificial Sequence: Synthetic Heavy chain variable region CDR H1 nucleic acid sequence
ttcacctttaacacatatgccatgaat

SEQ ID NO: 6149 - protein, 19 aa, Artificial Sequence
  Description of Artificial Sequence: Synthetic Heavy chain variable region CDR H2 amino acid sequence
RIRSKYNNYATYYADSVKD

SEQ ID NO: 6150 - DNA, 57 bp, Artificial Sequence; identical to SEQ ID NO: 6
  Description of Artificial Sequence: Synthetic Heavy chain variable region CDR H2 nucleic acid sequence

SEQ ID NO: 6151 - protein, 16 aa, Artificial Sequence
  Description of Artificial Sequence: Synthetic Heavy chain variable region CDR H3 amino acid sequence
VRHGNFGNSYVSWFAY

SEQ ID NO: 6152 - DNA, 48 bp, Artificial Sequence; identical to SEQ ID NO: 8
  Description of Artificial Sequence: Synthetic Heavy chain variable region CDR H3 nucleic acid sequence

SEQ ID NO: 6153 - DNA, 327 bp, Artificial Sequence; identical to SEQ ID NO: 25
  Description of Artificial Sequence: Synthetic Light chain variable region nucleic acid sequence

SEQ ID NO: 6154 - protein, 109 aa, Artificial Sequence; identical to SEQ ID NO: 26
  Description of Artificial Sequence: Synthetic Light chain variable region amino acid sequence

SEQ ID NO: 6155 - protein, 14 aa, Artificial Sequence
  Description of Artificial Sequence: Synthetic Light chain variable region CDR L1 amino acid sequence
RSSTGAVTTSNYAN

SEQ ID NO: 6156 - DNA, 42 bp, Artificial Sequence; identical to SEQ ID NO: 12
  Description of Artificial Sequence: Synthetic Light chain variable region CDR L1 nucleic acid sequence

SEQ ID NO: 6157 - protein, 7 aa, Artificial Sequence
  Description of Artificial Sequence: Synthetic Light chain variable region CDR L2 amino acid sequence
GTDKRAP

SEQ ID NO: 6158 - DNA, 21 bp, Artificial Sequence
  Description of Artificial Sequence: Synthetic Light chain variable region CDR L2 nucleic acid sequence
ggcacagacaagcgcgctccc

SEQ ID NO: 6159 - protein, 9 aa, Artificial Sequence
  Description of Artificial Sequence: Synthetic Light chain variable region CDR L3 amino acid sequence
ALWYSNLWV

SEQ ID NO: 6160 - DNA, 27 bp, Artificial Sequence
  Description of Artificial Sequence: Synthetic Light chain variable region CDR L3 nucleic acid sequence
gcgctgtggtacagtaacctttgggtg

SEQ ID NO: 6161 - DNA, 375 bp, Artificial Sequence; identical to SEQ ID NO: 1
  Description of Artificial Sequence: Synthetic Heavy chain variable region nucleic acid sequence

SEQ ID NO: 6162 - protein, 125 aa, Artificial Sequence; identical to SEQ ID NO: 2
  Description of Artificial Sequence: Synthetic Heavy chain variable region amino acid sequence

SEQ ID NO: 6163 - protein, 9 aa, Artificial Sequence
  Description of Artificial Sequence: Synthetic Heavy chain variable region CDR H1 amino acid sequence
FTFNTYAMN

SEQ ID NO: 6164 - DNA, 27 bp, Artificial Sequence
  Description of Artificial Sequence: Synthetic Heavy chain variable region CDR H1 nucleic acid sequence
ttcacctttaacacatatgccatgaat

SEQ ID NO: 6165 - protein, 19 aa, Artificial Sequence
  Description of Artificial Sequence: Synthetic Heavy chain variable region CDR H2 amino acid sequence
RIRSKYNNYATYYADSVKD

SEQ ID NO: 6166 - DNA, 57 bp, Artificial Sequence; identical to SEQ ID NO: 6
  Description of Artificial Sequence: Synthetic Heavy chain variable region CDR H2 nucleic acid sequence

SEQ ID NO: 6167 - protein, 16 aa, Artificial Sequence
  Description of Artificial Sequence: Synthetic Heavy chain variable region CDR H3 amino acid sequence
VRHGNFGNSYVSWFAY

SEQ ID NO: 6168 - DNA, 48 bp, Artificial Sequence; identical to SEQ ID NO: 8
  Description of Artificial Sequence: Synthetic Heavy chain variable region CDR H3 nucleic acid sequence

SEQ ID NO: 6169 - DNA, 327 bp, Artificial Sequence; identical to SEQ ID NO: 41
  Description of Artificial Sequence: Synthetic Light chain variable region nucleic acid sequence

SEQ ID NO: 6170 - protein, 109 aa, Artificial Sequence; identical to SEQ ID NO: 42
  Description of Artificial Sequence: Synthetic Light chain variable region amino acid sequence

SEQ ID NO: 6171 - protein, 14 aa, Artificial Sequence
  Description of Artificial Sequence: Synthetic Light chain variable region CDR L1 amino acid sequence
RSSTGAVTTSNYAN

SEQ ID NO: 6172 - DNA, 42 bp, Artificial Sequence; identical to SEQ ID NO: 12
  Description of Artificial Sequence: Synthetic Light chain variable region CDR L1 nucleic acid sequence

SEQ ID NO: 6173 - protein, 7 aa, Artificial Sequence
  Description of Artificial Sequence: Synthetic Light chain variable region CDR L2 amino acid sequence
GTNKRAP

SEQ ID NO: 6174 - DNA, 21 bp, Artificial Sequence
  Description of Artificial Sequence: Synthetic Light chain variable region CDR L2 nucleic acid sequence
ggcacaaacaagcgcgctcct

SEQ ID NO: 6175 - protein, 9 aa, Artificial Sequence
  Description of Artificial Sequence: Synthetic Light chain variable region CDR L3 amino acid sequence
ALWYSNLWV

SEQ ID NO: 6176 - DNA, 27 bp, Artificial Sequence
  Description of Artificial Sequence: Synthetic Light chain variable region CDR L3 nucleic acid sequence
gcgctgtggtacagtaacctttgggtg

SEQ ID NO: 6177 - DNA, 375 bp, Artificial Sequence; identical to SEQ ID NO: 81
  Description of Artificial Sequence: Synthetic Heavy chain variable region nucleic acid sequence

SEQ ID NO: 6178 - protein, 125 aa, Artificial Sequence; identical to SEQ ID NO: 82
  Description of Artificial Sequence: Synthetic Heavy chain variable region amino acid sequence

SEQ ID NO: 6179 - protein, 9 aa, Artificial Sequence
  Description of Artificial Sequence: Synthetic Heavy chain variable region CDR H1 amino acid sequence
FTFDTYAMN

SEQ ID NO: 6180 - DNA, 27 bp, Artificial Sequence
  Description of Artificial Sequence: Synthetic Heavy chain variable region CDR H1 nucleic acid sequence
ttcacctttgacacatatgccatgaat

SEQ ID NO: 6181 - protein, 19 aa, Artificial Sequence
  Description of Artificial Sequence: Synthetic Heavy chain variable region CDR H2 amino acid sequence
RIRSKYNNYATYYADSVKD

SEQ ID NO: 6182 - DNA, 57 bp, Artificial Sequence; identical to SEQ ID NO: 6
  Description of Artificial Sequence: Synthetic Heavy chain variable region CDR H2 nucleic acid sequence

SEQ ID NO: 6183 - protein, 16 aa, Artificial Sequence
  Description of Artificial Sequence: Synthetic Heavy chain variable region CDR H3 amino acid sequence
VRHGNFGNSYVSWFAH

SEQ ID NO: 6184 - DNA, 48 bp, Artificial Sequence; identical to SEQ ID NO: 72
  Description of Artificial Sequence: Synthetic Heavy chain variable region CDR H3 nucleic acid sequence

SEQ ID NO: 6185 - DNA, 327 bp, Artificial Sequence
  Description of Artificial Sequence: Synthetic Light chain variable region nucleic acid sequence
cagactgtggtgacccaggagccatcgttctcagtgtcccctggagggacagtcacactcacttgtagatcaagcactggcgcagtcactactagtaactacgccaactgggtccagcagaccccaggccaggctccgcgcggactcatcggcggcacaaacaagcgcgctcctggggtccctgatcgcttctctggctccctgcttggggacaaagctgccctcaccatcacgggggcccaggcagatgatgaatctgattattactgtgcgctgtggtacagtaacctttgggtgttcggcggagggaccaagctgaccgtccta

SEQ ID NO: 6186 - protein, 109 aa, Artificial Sequence; identical to SEQ ID NO: 10
  Description of Artificial Sequence: Synthetic Light chain variable region amino acid sequence

SEQ ID NO: 6187 - protein, 14 aa, Artificial Sequence
  Description of Artificial Sequence: Synthetic Light chain variable region CDR L1 amino acid sequence
RSSTGAVTTSNYAN

SEQ ID NO: 6188 - DNA, 42 bp, Artificial Sequence; identical to SEQ ID NO: 12
  Description of Artificial Sequence: Synthetic Light chain variable region CDR L1 nucleic acid sequence

SEQ ID NO: 6189 - protein, 7 aa, Artificial Sequence
  Description of Artificial Sequence: Synthetic Light chain variable region CDR L2 amino acid sequence
GTNKRAP

SEQ ID NO: 6190 - DNA, 21 bp, Artificial Sequence
  Description of Artificial Sequence: Synthetic Light chain variable region CDR L2 nucleic acid sequence
ggcacaaacaagcgcgctcct

SEQ ID NO: 6191 - protein, 9 aa, Artificial Sequence
  Description of Artificial Sequence: Synthetic Light chain variable region CDR L3 amino acid sequence
ALWYSNLWV

SEQ ID NO: 6192 - DNA, 27 bp, Artificial Sequence
  Description of Artificial Sequence: Synthetic Light chain variable region CDR L3 nucleic acid sequence
gcgctgtggtacagtaacctttgggtg

SEQ ID NO: 6193 - DNA, 357 bp, Artificial Sequence
  Description of Artificial Sequence: Synthetic Heavy chain variable region nucleic acid sequence
caggtgcagctggtgcagtctggggctgaggtgaagaagcctggggcctcagtgaaggtctcctgcaaggcttctggattcaacatcaaggactactatatgcactgggtgcgacaggctcctggacaaaggcttgagtggatgggatggatcgaccttgaaaatgctaacacaatctatgacgctaagtttcagggcagggtcaccataaccagggacacgtccgccagcacagcctacatggagctgagcagcctgagatctgaagacacggcggtgtactactgcgcgagagatgcgtacgggagatatttttacagggtgtggggccaaggaaccctggtcaccgtctcctca

SEQ ID NO: 6194 - protein, 119 aa, Artificial Sequence
  Description of Artificial Sequence: Synthetic Heavy chain variable region amino acid sequence
QVQLVQSGAEVKKPGASVKVSCKASGFNIKDYYMHWVRQAPGQRLEWMGWIDLENANTIYDAKFQGRVTITRDTSASTAYMELSSLRSEDTAVYYCARDAYGRYFYRVWGQGTLVTVSS

SEQ ID NO: 6195 - protein, 9 aa, Artificial Sequence
  Description of Artificial Sequence: Synthetic Heavy chain variable region CDR H1 amino acid sequence
FNIKDYYMH

SEQ ID NO: 6196 - DNA, 27 bp, Artificial Sequence
  Description of Artificial Sequence: Synthetic Heavy chain variable region CDR H1 nucleic acid sequence
ttcaacatcaaggactactatatgcac

SEQ ID NO: 6197 - protein, 17 aa, Artificial Sequence
  Description of Artificial Sequence: Synthetic Heavy chain variable region CDR H2 amino acid sequence
WIDLENANTIYDAKFQG

SEQ ID NO: 6198 - DNA, 51 bp, Artificial Sequence; identical to SEQ ID NO: 4662
  Description of Artificial Sequence: Synthetic Heavy chain variable region CDR H2 nucleic acid sequence

SEQ ID NO: 6199 - protein, 12 aa, Artificial Sequence
  Description of Artificial Sequence: Synthetic Heavy chain variable region CDR H3 amino acid sequence
ARDAYGRYFYRV

SEQ ID NO: 6200 - DNA, 36 bp, Artificial Sequence
  Description of Artificial Sequence: Synthetic Heavy chain variable region CDR H3 nucleic acid sequence
gcgagagatgcgtacgggagatatttttacagggtg

SEQ ID NO: 6201 - DNA, 336 bp, Artificial Sequence; identical to SEQ ID NO: 4537
  Description of Artificial Sequence: Synthetic Light chain variable region nucleic acid sequence

SEQ ID NO: 6202 - protein, 112 aa, Artificial Sequence; identical to SEQ ID NO: 4538
  Description of Artificial Sequence: Synthetic Light chain variable region amino acid sequence

SEQ ID NO: 6203 - protein, 17 aa, Artificial Sequence
  Description of Artificial Sequence: Synthetic Light chain variable region CDR L1 amino acid sequence
KSSQSLLNARTGKNYLA

SEQ ID NO: 6204 - DNA, 51 bp, Artificial Sequence; identical to SEQ ID NO: 4540
  Description of Artificial Sequence: Synthetic Light chain variable region CDR L1 nucleic acid sequence

SEQ ID NO: 6205 - protein, 7 aa, Artificial Sequence
  Description of Artificial Sequence: Synthetic Light chain variable region CDR L2 amino acid sequence
WASTRES

SEQ ID NO: 6206 - DNA, 21 bp, Artificial Sequence
  Description of Artificial Sequence: Synthetic Light chain variable region CDR L2 nucleic acid sequence
tgggcatctacccgggaatcc

SEQ ID NO: 6207 - protein, 8 aa, Artificial Sequence
  Description of Artificial Sequence: Synthetic Light chain variable region CDR L3 amino acid sequence
KQSYSRRT

SEQ ID NO: 6208 - DNA, 24 bp, Artificial Sequence
  Description of Artificial Sequence: Synthetic Light chain variable region CDR L3 nucleic acid sequence
aagcaatcttattctcggagaact

SEQ ID NO: 6209 - DNA, 357 bp, Artificial Sequence
  Description of Artificial Sequence: Synthetic Heavy chain variable region nucleic acid sequence
caggtgcagctggtgcagtctggggctgaggtgaagaagcctggggcctcagtgaaggtctcctgcaaggcttctggattcaacatcaaggactactatatgcactgggtgcgacaggctcctggacaaaggcttgagtggatgggatggatcgaccttgaaaatgctaacacaatctatgacgctaagtttcagggcagggtcaccataaccagggacacgtccgccagcacagcctacatggagctgagcagcctgagatctgaagacacggcggtgtactactgcccgagagatgcttacgggagatatttttacgacgtgtggggccaaggaaccctggtcaccgtctcctca

SEQ ID NO: 6210 - protein, 119 aa, Artificial Sequence
  Description of Artificial Sequence: Synthetic Heavy chain variable region amino acid sequence
QVQLVQSGAEVKKPGASVKVSCKASGFNIKDYYMHWVRQAPGQRLEWMGWIDLENANTIYDAKFQGRVTITRDTSASTAYMELSSLRSEDTAVYYCPRDAYGRYFYDVWGQGTLVTVSS

SEQ ID NO: 6211 - protein, 9 aa, Artificial Sequence
  Description of Artificial Sequence: Synthetic Heavy chain variable region CDR H1 amino acid sequence
FNIKDYYMH

SEQ ID NO: 6212 - DNA, 27 bp, Artificial Sequence
  Description of Artificial Sequence: Synthetic Heavy chain variable region CDR H1 nucleic acid sequence
ttcaacatcaaggactactatatgcac

SEQ ID NO: 6213 - protein, 17 aa, Artificial Sequence
  Description of Artificial Sequence: Synthetic Heavy chain variable region CDR H2 amino acid sequence
WIDLENANTIYDAKFQG

SEQ ID NO: 6214 - DNA, 51 bp, Artificial Sequence; identical to SEQ ID NO: 4662
  Description of Artificial Sequence: Synthetic Heavy chain variable region CDR H2 nucleic acid sequence

SEQ ID NO: 6215 - protein, 12 aa, Artificial Sequence
  Description of Artificial Sequence: Synthetic Heavy chain variable region CDR H3 amino acid sequence
PRDAYGRYFYDV

SEQ ID NO: 6216 - DNA, 36 bp, Artificial Sequence
  Description of Artificial Sequence: Synthetic Heavy chain variable region CDR H3 nucleic acid sequence
ccgagagatgcttacgggagatatttttacgacgtg

SEQ ID NO: 6217 - DNA, 336 bp, Artificial Sequence; identical to SEQ ID NO: 4537
  Description of Artificial Sequence: Synthetic Light chain variable region nucleic acid sequence

SEQ ID NO: 6218 - protein, 112 aa, Artificial Sequence; identical to SEQ ID NO: 4538
  Description of Artificial Sequence: Synthetic Light chain variable region amino acid sequence

SEQ ID NO: 6219 - protein, 17 aa, Artificial Sequence
  Description of Artificial Sequence: Synthetic Light chain variable region CDR L1 amino acid sequence
KSSQSLLNARTGKNYLA

SEQ ID NO: 6220 - DNA, 51 bp, Artificial Sequence; identical to SEQ ID NO: 4540
  Description of Artificial Sequence: Synthetic Light chain variable region CDR L1 nucleic acid sequence

SEQ ID NO: 6221 - protein, 7 aa, Artificial Sequence
  Description of Artificial Sequence: Synthetic Light chain variable region CDR L2 amino acid sequence
WASTRES

SEQ ID NO: 6222 - DNA, 21 bp, Artificial Sequence
  Description of Artificial Sequence: Synthetic Light chain variable region CDR L2 nucleic acid sequence
tgggcatctacccgggaatcc

SEQ ID NO: 6223 - protein, 8 aa, Artificial Sequence
  Description of Artificial Sequence: Synthetic Light chain variable region CDR L3 amino acid sequence
KQSYSRRT

SEQ ID NO: 6224 - DNA, 24 bp, Artificial Sequence
  Description of Artificial Sequence: Synthetic Light chain variable region CDR L3 nucleic acid sequence
aagcaatcttattctcggagaact

SEQ ID NO: 6225 - DNA, 357 bp, Artificial Sequence
  Description of Artificial Sequence: Synthetic Heavy chain variable region nucleic acid sequence
caggtgcagctggtgcagtctggggctgaggtgaagaagcctggggcctcagtgaaggtctcctgcaaggcttctggattcaacatcaaggactactatatgcactgggtgcgacaggctcctggacaaaggcttgagtggatgggatggatcgaccttgaaaatgctaacacaatctatgacgctaagtttcagggcagggtcaccataaccagggacacgtccgccagcacagcctacatggagctgagcagcctgagatctgaagacacggcggtgtactactgcgcgagagatgcgtacgggagatatttttacgacgggtggggccaaggaaccctggtcaccgtctcctca

SEQ ID NO: 6226 - protein, 119 aa, Artificial Sequence
  Description of Artificial Sequence: Synthetic Heavy chain variable region amino acid sequence
QVQLVQSGAEVKKPGASVKVSCKASGFNIKDYYMHWVRQAPGQRLEWMGWIDLENANTIYDAKFQGRVTITRDTSASTAYMELSSLRSEDTAVYYCARDAYGRYFYDGWGQGTLVTVSS

SEQ ID NO: 6227 - protein, 9 aa, Artificial Sequence
  Description of Artificial Sequence: Synthetic Heavy chain variable region CDR H1 amino acid sequence
FNIKDYYMH

SEQ ID NO: 6228 - DNA, 27 bp, Artificial Sequence
  Description of Artificial Sequence: Synthetic Heavy chain variable region CDR H1 nucleic acid sequence
ttcaacatcaaggactactatatgcac

SEQ ID NO: 6229 - protein, 17 aa, Artificial Sequence
  Description of Artificial Sequence: Synthetic Heavy chain variable region CDR H2 amino acid sequence
WIDLENANTIYDAKFQG

SEQ ID NO: 6230 - DNA, 51 bp, Artificial Sequence; identical to SEQ ID NO: 4662
  Description of Artificial Sequence: Synthetic Heavy chain variable region CDR H2 nucleic acid sequence

SEQ ID NO: 6231 - protein, 12 aa, Artificial Sequence
  Description of Artificial Sequence: Synthetic Heavy chain variable region CDR H3 amino acid sequence
ARDAYGRYFYDG

SEQ ID NO: 6232 - DNA, 36 bp, Artificial Sequence
  Description of Artificial Sequence: Synthetic Heavy chain variable region CDR H3 nucleic acid sequence
gcgagagatgcgtacgggagatatttttacgacggg

SEQ ID NO: 6233 - DNA, 336 bp, Artificial Sequence; identical to SEQ ID NO: 4537
  Description of Artificial Sequence: Synthetic Light chain variable region nucleic acid sequence

SEQ ID NO: 6234 - protein, 112 aa, Artificial Sequence; identical to SEQ ID NO: 4538
  Description of Artificial Sequence: Synthetic Light chain variable region amino acid sequence

SEQ ID NO: 6235 - protein, 17 aa, Artificial Sequence
  Description of Artificial Sequence: Synthetic Light chain variable region CDR L1 amino acid sequence
KSSQSLLNARTGKNYLA

SEQ ID NO: 6236 - DNA, 51 bp, Artificial Sequence; identical to SEQ ID NO: 4540
  Description of Artificial Sequence: Synthetic Light chain variable region CDR L1 nucleic acid sequence

SEQ ID NO: 6237 - protein, 7 aa, Artificial Sequence
  Description of Artificial Sequence: Synthetic Light chain variable region CDR L2 amino acid sequence
WASTRES

SEQ ID NO: 6238 - DNA, 21 bp, Artificial Sequence
  Description of Artificial Sequence: Synthetic Light chain variable region CDR L2 nucleic acid sequence
tgggcatctacccgggaatcc

SEQ ID NO: 6239 - protein, 8 aa, Artificial Sequence
  Description of Artificial Sequence: Synthetic Light chain variable region CDR L3 amino acid sequence
KQSYSRRT

SEQ ID NO: 6240 - DNA, 24 bp, Artificial Sequence
  Description of Artificial Sequence: Synthetic Light chain variable region CDR L3 nucleic acid sequence
aagcaatcttattctcggagaact

SEQ ID NO: 6241 - DNA, 357 bp, Artificial Sequence; identical to SEQ ID NO: 5249
  Description of Artificial Sequence: Synthetic Heavy chain variable region nucleic acid sequence

SEQ ID NO: 6242 - protein, 119 aa, Artificial Sequence; identical to SEQ ID NO: 5250
  Description of Artificial Sequence: Synthetic Heavy chain variable region amino acid sequence

SEQ ID NO: 6243 - protein, 9 aa, Artificial Sequence
  Description of Artificial Sequence: Synthetic Heavy chain variable region CDR H1 amino acid sequence
FNIKDYYMH

SEQ ID NO: 6244 - DNA, 27 bp, Artificial Sequence
  Description of Artificial Sequence: Synthetic Heavy chain variable region CDR H1 nucleic acid sequence
ttcaacatcaaggactactatatgcac

SEQ ID NO: 6245 - protein, 17 aa, Artificial Sequence
  Description of Artificial Sequence: Synthetic Heavy chain variable region CDR H2 amino acid sequence
WIDLENANTIYDAKFQG

SEQ ID NO: 6246 - DNA, 51 bp, Artificial Sequence; identical to SEQ ID NO: 4662
  Description of Artificial Sequence: Synthetic Heavy chain variable region CDR H2 nucleic acid sequence

SEQ ID NO: 6247 - protein, 12 aa, Artificial Sequence
  Description of Artificial Sequence: Synthetic Heavy chain variable region CDR H3 amino acid sequence
ARDRYGAYFYDV

SEQ ID NO: 6248 - DNA, 36 bp, Artificial Sequence; identical to SEQ ID NO: 5256
  Description of Artificial Sequence: Synthetic Heavy chain variable region CDR H3 nucleic acid sequence

SEQ ID NO: 6249 - DNA, 336 bp, Artificial Sequence; identical to SEQ ID NO: 4537
  Description of Artificial Sequence: Synthetic Light chain variable region nucleic acid sequence

SEQ ID NO: 6250 - protein, 112 aa, Artificial Sequence; identical to SEQ ID NO: 4538
  Description of Artificial Sequence: Synthetic Light chain variable region amino acid sequence

SEQ ID NO: 6251 - protein, 17 aa, Artificial Sequence
  Description of Artificial Sequence: Synthetic Light chain variable region CDR L1 amino acid sequence
KSSQSLLNARTGKNYLA

SEQ ID NO: 6252 - DNA, 51 bp, Artificial Sequence; identical to SEQ ID NO: 4540
  Description of Artificial Sequence: Synthetic Light chain variable region CDR L1 nucleic acid sequence

SEQ ID NO: 6253 - protein, 7 aa, Artificial Sequence
  Description of Artificial Sequence: Synthetic Light chain variable region CDR L2 amino acid sequence
WASTRES

SEQ ID NO: 6254 - DNA, 21 bp, Artificial Sequence
  Description of Artificial Sequence: Synthetic Light chain variable region CDR L2 nucleic acid sequence
tgggcatctacccgggaatcc

SEQ ID NO: 6255 - protein, 8 aa, Artificial Sequence
  Description of Artificial Sequence: Synthetic Light chain variable region CDR L3 amino acid sequence
KQSYSRRT

SEQ ID NO: 6256 - DNA, 24 bp, Artificial Sequence
  Description of Artificial Sequence: Synthetic Light chain variable region CDR L3 nucleic acid sequence
aagcaatcttattctcggagaact

SEQ ID NO: 6257 - DNA, 357 bp, Artificial Sequence
  Description of Artificial Sequence: Synthetic Heavy chain variable region nucleic acid sequence
caggtgcagctggtgcagtctggggctgaggtgaagaagcctggggcctcagtgaaggtctcctgcaaggcttctggattcaacatcaaggactactatatgcactgggtgcgacaggctcctggacaaaggcttgagtggatgggatggatcgaccttgaaaatgctaacacaatctatgacgctaagtttcagggcagggtcaccataaccagggacacgtccgccagcacagcctacatggagctgagcagcctgagatctgaagacacggcggtgtactactgcgcgagagatcggtacgggagatatttttacgacgtgtggggccaaggaaccctggtcaccgtctcctca

SEQ ID NO: 6258 - protein, 119 aa, Artificial Sequence
  Description of Artificial Sequence: Synthetic Heavy chain variable region amino acid sequence
QVQLVQSGAEVKKPGASVKVSCKASGFNIKDYYMHWVRQAPGQRLEWMGWIDLENANTIYDAKFQGRVTITRDTSASTAYMELSSLRSEDTAVYYCARDRYGRYFYDVWGQGTLVTVSS

SEQ ID NO: 6259 - protein, 9 aa, Artificial Sequence
  Description of Artificial Sequence: Synthetic Heavy chain variable region CDR H1 amino acid sequence
FNIKDYYMH

SEQ ID NO: 6260 - DNA, 27 bp, Artificial Sequence
  Description of Artificial Sequence: Synthetic Heavy chain variable region CDR H1 nucleic acid sequence
ttcaacatcaaggactactatatgcac

SEQ ID NO: 6261 - protein, 17 aa, Artificial Sequence
  Description of Artificial Sequence: Synthetic Heavy chain variable region CDR H2 amino acid sequence
WIDLENANTIYDAKFQG

SEQ ID NO: 6262 - DNA, 51 bp, Artificial Sequence; identical to SEQ ID NO: 4662
  Description of Artificial Sequence: Synthetic Heavy chain variable region CDR H2 nucleic acid sequence

SEQ ID NO: 6263 - protein, 12 aa, Artificial Sequence
  Description of Artificial Sequence: Synthetic Heavy chain variable region CDR H3 amino acid sequence
ARDRYGRYFYDV

SEQ ID NO: 6264 - DNA, 36 bp, Artificial Sequence
  Description of Artificial Sequence: Synthetic Heavy chain variable region CDR H3 nucleic acid sequence
gcgagagatcggtacgggagatatttttacgacgtg

SEQ ID NO: 6265 - DNA, 336 bp, Artificial Sequence; identical to SEQ ID NO: 4537
  Description of Artificial Sequence: Synthetic Light chain variable region nucleic acid sequence

SEQ ID NO: 6266 - protein, 112 aa, Artificial Sequence; identical to SEQ ID NO: 4538
  Description of Artificial Sequence: Synthetic Light chain variable region amino acid sequence

SEQ ID NO: 6267 - protein, 17 aa, Artificial Sequence
  Description of Artificial Sequence: Synthetic Light chain variable region CDR L1 amino acid sequence
KSSQSLLNARTGKNYLA

SEQ ID NO: 6268 - DNA, 51 bp, Artificial Sequence; identical to SEQ ID NO: 4540
  Description of Artificial Sequence: Synthetic Light chain variable region CDR L1 nucleic acid sequence

SEQ ID NO: 6269 - protein, 7 aa, Artificial Sequence
  Description of Artificial Sequence: Synthetic Light chain variable region CDR L2 amino acid sequence
WASTRES

SEQ ID NO: 6270 - DNA, 21 bp, Artificial Sequence
  Description of Artificial Sequence: Synthetic Light chain variable region CDR L2 nucleic acid sequence
tgggcatctacccgggaatcc

SEQ ID NO: 6271 - protein, 8 aa, Artificial Sequence
  Description of Artificial Sequence: Synthetic Light chain variable region CDR L3 amino acid sequence
KQSYSRRT

SEQ ID NO: 6272 - DNA, 24 bp, Artificial Sequence
  Description of Artificial Sequence: Synthetic Light chain variable region CDR L3 nucleic acid sequence
aagcaatcttattctcggagaact

SEQ ID NO: 6273 - DNA, 357 bp, Artificial Sequence
  Description of Artificial Sequence: Synthetic Heavy chain variable region nucleic acid sequence
caggtgcagctggtgcagtctggggctgaggtgaagaagcctggggcctcagtgaaggtctcctgcaaggcttctggattcaacatcaaggactactatatgcactgggtgcgacaggctcctggacaaaggcttgagtggatgggatggatcgaccttgaaaatgctaacacaatctatgacgctaagtttcagggcagggtcaccataaccagggacacgtccgccagcacagcctacatggagctgagcagcctgagatctgaagacacggcggtgtactactgcgcgagagattcgtacgggagatatttttacgacgtgtggggccaaggaaccctggtcaccgtctcctca

SEQ ID NO: 6274 - protein, 119 aa, Artificial Sequence
  Description of Artificial Sequence: Synthetic Heavy chain variable region amino acid sequence
QVQLVQSGAEVKKPGASVKVSCKASGFNIKDYYMHWVRQAPGQRLEWMGWIDLENANTIYDAKFQGRVTITRDTSASTAYMELSSLRSEDTAVYYCARDSYGRYFYDVWGQGTLVTVSS

SEQ ID NO: 6275 - protein, 9 aa, Artificial Sequence
  Description of Artificial Sequence: Synthetic Heavy chain variable region CDR H1 amino acid sequence
FNIKDYYMH

SEQ ID NO: 6276 - DNA, 27 bp, Artificial Sequence
  Description of Artificial Sequence: Synthetic Heavy chain variable region CDR H1 nucleic acid sequence
ttcaacatcaaggactactatatgcac

SEQ ID NO: 6277 - protein, 17 aa, Artificial Sequence
  Description of Artificial Sequence: Synthetic Heavy chain variable region CDR H2 amino acid sequence
WIDLENANTIYDAKFQG

SEQ ID NO: 6278 - DNA, 51 bp, Artificial Sequence; identical to SEQ ID NO: 4662
  Description of Artificial Sequence: Synthetic Heavy chain variable region CDR H2 nucleic acid sequence

SEQ ID NO: 6279 - protein, 12 aa, Artificial Sequence
  Description of Artificial Sequence: Synthetic Heavy chain variable region CDR H3 amino acid sequence
ARDSYGRYFYDV

SEQ ID NO: 6280 - DNA, 36 bp, Artificial Sequence
  Description of Artificial Sequence: Synthetic Heavy chain variable region CDR H3 nucleic acid sequence
gcgagagattcgtacgggagatatttttacgacgtg

SEQ ID NO: 6281 - DNA, 336 bp, Artificial Sequence; identical to SEQ ID NO: 4537
  Description of Artificial Sequence: Synthetic Light chain variable region nucleic acid sequence

SEQ ID NO: 6282 - protein, 112 aa, Artificial Sequence; identical to SEQ ID NO: 4538
  Description of Artificial Sequence: Synthetic Light chain variable region amino acid sequence

SEQ ID NO: 6283 - protein, 17 aa, Artificial Sequence
  Description of Artificial Sequence: Synthetic Light chain variable region CDR L1 amino acid sequence
KSSQSLLNARTGKNYLA

SEQ ID NO: 6284 - DNA, 51 bp, Artificial Sequence; identical to SEQ ID NO: 4540
  Description of Artificial Sequence: Synthetic Light chain variable region CDR L1 nucleic acid sequence

SEQ ID NO: 6285 - protein, 7 aa, Artificial Sequence
  Description of Artificial Sequence: Synthetic Light chain variable region CDR L2 amino acid sequence
WASTRES

SEQ ID NO: 6286 - DNA, 21 bp, Artificial Sequence
  Description of Artificial Sequence: Synthetic Light chain variable region CDR L2 nucleic acid sequence
tgggcatctacccgggaatcc

SEQ ID NO: 6287 - protein, 8 aa, Artificial Sequence
  Description of Artificial Sequence: Synthetic Light chain variable region CDR L3 amino acid sequence
KQSYSRRT

SEQ ID NO: 6288 - DNA, 24 bp, Artificial Sequence
  Description of Artificial Sequence: Synthetic Light chain variable region CDR L3 nucleic acid sequence
aagcaatcttattctcggagaact

SEQ ID NO: 6289 - DNA, 357 bp, Artificial Sequence
  Description of Artificial Sequence: Synthetic Heavy chain variable region nucleic acid sequence
caggtgcagctggtgcagtctggggctgaggtgaagaagcctggggcctcagtgaaggtctcctgcaaggcttctggattcaacatcaaggactactatatgcactgggtgcgacaggctcctggacaaaggcttgagtggatgggatggatcgaccttgaaaatgctaacacaatctatgacgctaagtttcagggcagggtcaccataaccagggacacgtccgccagcacagcctacatggagctgagcagcctgagatctgaagacacggcggtgtactactgcgcgagagatgtgtacgggagatatctttacgacgtgtggggccaaggaaccctggtcaccgtctcctca

SEQ ID NO: 6290 - protein, 119 aa, Artificial Sequence
  Description of Artificial Sequence: Synthetic Heavy chain variable region amino acid sequence
QVQLVQSGAEVKKPGASVKVSCKASGFNIKDYYMHWVRQAPGQRLEWMGWIDLENANTIYDAKFQGRVTITRDTSASTAYMELSSLRSEDTAVYYCARDVYGRYLYDVWGQGTLVTVSS

SEQ ID NO: 6291 - protein, 9 aa, Artificial Sequence
  Description of Artificial Sequence: Synthetic Heavy chain variable region CDR H1 amino acid sequence
FNIKDYYMH

SEQ ID NO: 6292 - DNA, 27 bp, Artificial Sequence
  Description of Artificial Sequence: Synthetic Heavy chain variable region CDR H1 nucleic acid sequence
ttcaacatcaaggactactatatgcac

SEQ ID NO: 6293 - protein, 17 aa, Artificial Sequence
  Description of Artificial Sequence: Synthetic Heavy chain variable region CDR H2 amino acid sequence
WIDLENANTIYDAKFQG

SEQ ID NO: 6294 - DNA, 51 bp, Artificial Sequence; identical to SEQ ID NO: 4662
  Description of Artificial Sequence: Synthetic Heavy chain variable region CDR H2 nucleic acid sequence

SEQ ID NO: 6295 - protein, 12 aa, Artificial Sequence
  Description of Artificial Sequence: Synthetic Heavy chain variable region CDR H3 amino acid sequence
ARDVYGRYLYDV

SEQ ID NO: 6296 - DNA, 36 bp, Artificial Sequence
  Description of Artificial Sequence: Synthetic Heavy chain variable region CDR H3 nucleic acid sequence
gcgagagatgtgtacgggagatatctttacgacgtg

SEQ ID NO: 6297 - DNA, 336 bp, Artificial Sequence; identical to SEQ ID NO: 4537
  Description of Artificial Sequence: Synthetic Light chain variable region nucleic acid sequence

SEQ ID NO: 6298 - protein, 112 aa, Artificial Sequence; identical to SEQ ID NO: 4538
  Description of Artificial Sequence: Synthetic Light chain variable region amino acid sequence

SEQ ID NO: 6299 - protein, 17 aa, Artificial Sequence
  Description of Artificial Sequence: Synthetic Light chain variable region CDR L1 amino acid sequence
KSSQSLLNARTGKNYLA

SEQ ID NO: 6300 - DNA, 51 bp, Artificial Sequence; identical to SEQ ID NO: 4540
  Description of Artificial Sequence: Synthetic Light chain variable region CDR L1 nucleic acid sequence

SEQ ID NO: 6301 - protein, 7 aa, Artificial Sequence
  Description of Artificial Sequence: Synthetic Light chain variable region CDR L2 amino acid sequence
WASTRES

SEQ ID NO: 6302 - DNA, 21 bp, Artificial Sequence
  Description of Artificial Sequence: Synthetic Light chain variable region CDR L2 nucleic acid sequence
tgggcatctacccgggaatcc

SEQ ID NO: 6303 - protein, 8 aa, Artificial Sequence
  Description of Artificial Sequence: Synthetic Light chain variable region CDR L3 amino acid sequence
KQSYSRRT

SEQ ID NO: 6304 - DNA, 24 bp, Artificial Sequence
  Description of Artificial Sequence: Synthetic Light chain variable region CDR L3 nucleic acid sequence
aagcaatcttattctcggagaact

SEQ ID NO: 6305 - DNA, 357 bp, Artificial Sequence
  Description of Artificial Sequence: Synthetic Heavy chain variable region nucleic acid sequence
caggtgcagctggtgcagtctggggctgaggtgaagaagcctggggcctcagtgaaggtctcctgcaaggcttctggattcaacatcaaggactactatatgcactgggtgcgacaggctcctggacaaaggcttgagtggatgggatggatcgaccttgaaaatgctaacacaatctatgacgctaagtttcagggcagggtcaccataaccagggacacgtccgccagcacagcctacatggagctgagcagcctgagatctgaagacacggcggtgtactactgcgcgagagatgtgtacaggagatatttttacgacgtgtggggccaaggaaccctggtcaccgtctcctca

SEQ ID NO: 6306 - protein, 119 aa, Artificial Sequence
  Description of Artificial Sequence: Synthetic Heavy chain variable region amino acid sequence
QVQLVQSGAEVKKPGASVKVSCKASGFNIKDYYMHWVRQAPGQRLEWMGWIDLENANTIYDAKFQGRVTITRDTSASTAYMELSSLRSEDTAVYYCARDVYRRYFYDVWGQGTLVTVSS

SEQ ID NO: 6307 - protein, 9 aa, Artificial Sequence
  Description of Artificial Sequence: Synthetic Heavy chain variable region CDR H1 amino acid sequence
FNIKDYYMH

SEQ ID NO: 6308 - DNA, 27 bp, Artificial Sequence
  Description of Artificial Sequence: Synthetic Heavy chain variable region CDR H1 nucleic acid sequence
ttcaacatcaaggactactatatgcac

SEQ ID NO: 6309 - protein, 17 aa, Artificial Sequence
  Description of Artificial Sequence: Synthetic Heavy chain variable region CDR H2 amino acid sequence
WIDLENANTIYDAKFQG

SEQ ID NO: 6310 - DNA, 51 bp, Artificial Sequence; identical to SEQ ID NO: 4662
  Description of Artificial Sequence: Synthetic Heavy chain variable region CDR H2 nucleic acid sequence

SEQ ID NO: 6311 - protein, 12 aa, Artificial Sequence
  Description of Artificial Sequence: Synthetic Heavy chain variable region CDR H3 amino acid sequence
ARDVYRRYFYDV

SEQ ID NO: 6312 - DNA, 36 bp, Artificial Sequence
  Description of Artificial Sequence: Synthetic Heavy chain variable region CDR H3 nucleic acid sequence
gcgagagatgtgtacaggagatatttttacgacgtg

SEQ ID NO: 6313 - DNA, 336 bp, Artificial Sequence; identical to SEQ ID NO: 4537
  Description of Artificial Sequence: Synthetic Light chain variable region nucleic acid sequence

SEQ ID NO: 6314 - protein, 112 aa, Artificial Sequence; identical to SEQ ID NO: 4538
  Description of Artificial Sequence: Synthetic Light chain variable region amino acid sequence

SEQ ID NO: 6315 - protein, 17 aa, Artificial Sequence
  Description of Artificial Sequence: Synthetic Light chain variable region CDR L1 amino acid sequence
KSSQSLLNARTGKNYLA

SEQ ID NO: 6316 - DNA, 51 bp, Artificial Sequence; identical to SEQ ID NO: 4540
  Description of Artificial Sequence: Synthetic Light chain variable region CDR L1 nucleic acid sequence

SEQ ID NO: 6317 - protein, 7 aa, Artificial Sequence
  Description of Artificial Sequence: Synthetic Light chain variable region CDR L2 amino acid sequence
WASTRES

SEQ ID NO: 6318 - DNA, 21 bp, Artificial Sequence
  Description of Artificial Sequence: Synthetic Light chain variable region CDR L2 nucleic acid sequence
tgggcatctacccgggaatcc

SEQ ID NO: 6319 - protein, 8 aa, Artificial Sequence
  Description of Artificial Sequence: Synthetic Light chain variable region CDR L3 amino acid sequence
KQSYSRRT

SEQ ID NO: 6320 - DNA, 24 bp, Artificial Sequence
  Description of Artificial Sequence: Synthetic Light chain variable region CDR L3 nucleic acid sequence
aagcaatcttattctcggagaact

SEQ ID NO: 6321 - DNA, 357 bp, Artificial Sequence
  Description of Artificial Sequence: Synthetic Heavy chain variable region nucleic acid sequence
caggtgcagctggtgcagtctggggctgaggtgaagaagcctggggcctcagtgaaggtctcctgcaaggcttctggattcaacatcaaggactactatatgcactgggtgcgacaggctcctggacaaaggcttgagtggatgggatggatcgaccttgaaaatgctaacacaatctatgacgctaagtttcagggcagggtcaccataaccagggacacgtccgccagcacagcctacatggagctgagcagcctgagatctgaagacacggcggtgtactactgcgtgagagatcttcgggggagatatttttacgacgtgtggggccaaggaaccctggtcaccgtctcctca

SEQ ID NO: 6322 - protein, 119 aa, Artificial Sequence
  Description of Artificial Sequence: Synthetic Heavy chain variable region amino acid sequence
QVQLVQSGAEVKKPGASVKVSCKASGFNIKDYYMHWVRQAPGQRLEWMGWIDLENANTIYDAKFQGRVTITRDTSASTAYMELSSLRSEDTAVYYCVRDLRGRYFYDVWGQGTLVTVSS

SEQ ID NO: 6323 - protein, 9 aa, Artificial Sequence
  Description of Artificial Sequence: Synthetic Heavy chain variable region CDR H1 amino acid sequence
FNIKDYYMH

SEQ ID NO: 6324 - DNA, 27 bp, Artificial Sequence
  Description of Artificial Sequence: Synthetic Heavy chain variable region CDR H1 nucleic acid sequence
ttcaacatcaaggactactatatgcac

SEQ ID NO: 6325 - protein, 17 aa, Artificial Sequence
  Description of Artificial Sequence: Synthetic Heavy chain variable region CDR H2 amino acid sequence
WIDLENANTIYDAKFQG

SEQ ID NO: 6326 - DNA, 51 bp, Artificial Sequence; identical to SEQ ID NO: 4662
  Description of Artificial Sequence: Synthetic Heavy chain variable region CDR H2 nucleic acid sequence

SEQ ID NO: 6327 - protein, 12 aa, Artificial Sequence
  Description of Artificial Sequence: Synthetic Heavy chain variable region CDR H3 amino acid sequence
VRDLRGRYFYDV

SEQ ID NO: 6328 - DNA, 36 bp, Artificial Sequence
  Description of Artificial Sequence: Synthetic Heavy chain variable region CDR H3 nucleic acid sequence
gtgagagatcttcgggggagatatttttacgacgtg

SEQ ID NO: 6329 - DNA, 336 bp, Artificial Sequence; identical to SEQ ID NO: 4537
  Description of Artificial Sequence: Synthetic Light chain variable region nucleic acid sequence

SEQ ID NO: 6330 - protein, 112 aa, Artificial Sequence; identical to SEQ ID NO: 4538
  Description of Artificial Sequence: Synthetic Light chain variable region amino acid sequence

SEQ ID NO: 6331 - protein, 17 aa, Artificial Sequence
  Description of Artificial Sequence: Synthetic Light chain variable region CDR L1 amino acid sequence
KSSQSLLNARTGKNYLA

SEQ ID NO: 6332 - DNA, 51 bp, Artificial Sequence; identical to SEQ ID NO: 4540
  Description of Artificial Sequence: Synthetic Light chain variable region CDR L1 nucleic acid sequence

SEQ ID NO: 6333 - protein, 7 aa, Artificial Sequence
  Description of Artificial Sequence: Synthetic Light chain variable region CDR L2 amino acid sequence
WASTRES

SEQ ID NO: 6334 - DNA, 21 bp, Artificial Sequence
  Description of Artificial Sequence: Synthetic Light chain variable region CDR L2 nucleic acid sequence
tgggcatctacccgggaatcc

SEQ ID NO: 6335 - protein, 8 aa, Artificial Sequence
  Description of Artificial Sequence: Synthetic Light chain variable region CDR L3 amino acid sequence
KQSYSRRT

SEQ ID NO: 6336 - DNA, 24 bp, Artificial Sequence
  Description of Artificial Sequence: Synthetic Light chain variable region CDR L3 nucleic acid sequence
aagcaatcttattctcggagaact

SEQ ID NO: 6337 - DNA, 375 bp, Artificial Sequence
  Description of Artificial Sequence: Synthetic Heavy chain variable region nucleic acid sequence
gaggtgcagctgttggagtctgggggaggcttggtacagcctggggggtccctgagactctcctgtgcagcctctggattcacctttgacacatatgccatgaattgggttcgccaggctccagggaaggggctggagtgggtcgcaaggattagatccaagtataacaattacgctacatactacgcagactccgtgaaggatcggttcaccatctccagagacgattccaagagcaagctgtatctgcaaatggaaagcctgagagccgaggacacggcggtgtactactgcgtcaggcacggtaacttcgggggtggttacgtatcctggtttgctcattggggccaaggaaccctggtcaccgtctcctca

SEQ ID NO: 6338 - protein, 125 aa, Artificial Sequence
  Description of Artificial Sequence: Synthetic Heavy chain variable region amino acid sequence
EVQLLESGGGLVQPGGSLRLSCAASGFTFDTYAMNWVRQAPGKGLEWVARIRSKYNNYATYYADSVKDRFTISRDDSKSKLYLQMESLRAEDTAVYYCVRHGNFGGGYVSWFAHWGQGTLVTVSS

SEQ ID NO: 6339 - protein, 9 aa, Artificial Sequence
  Description of Artificial Sequence: Synthetic Heavy chain variable region CDR H1 amino acid sequence
FTFDTYAMN

SEQ ID NO: 6340 - DNA, 27 bp, Artificial Sequence
  Description of Artificial Sequence: Synthetic Heavy chain variable region CDR H1 nucleic acid sequence
ttcacctttgacacatatgccatgaat

SEQ ID NO: 6341 - protein, 19 aa, Artificial Sequence
  Description of Artificial Sequence: Synthetic Heavy chain variable region CDR H2 amino acid sequence
RIRSKYNNYATYYADSVKD

SEQ ID NO: 6342 - DNA, 57 bp, Artificial Sequence; identical to SEQ ID NO: 6
  Description of Artificial Sequence: Synthetic Heavy chain variable region CDR H2 nucleic acid sequence

SEQ ID NO: 6343 - protein, 16 aa, Artificial Sequence
  Description of Artificial Sequence: Synthetic Heavy chain variable region CDR H3 amino acid sequence
VRHGNFGGGYVSWFAH

SEQ ID NO: 6344 - DNA, 48 bp, Artificial Sequence
  Description of Artificial Sequence: Synthetic Heavy chain variable region CDR H3 nucleic acid sequence
gtcaggcacggtaacttcgggggtggttacgtatcctggtttgctcat

SEQ ID NO: 6345 - DNA, 327 bp, Artificial Sequence; identical to SEQ ID NO: 345
  Description of Artificial Sequence: Synthetic Light chain variable region nucleic acid sequence

SEQ ID NO: 6346 - protein, 109 aa, Artificial Sequence; identical to SEQ ID NO: 346
  Description of Artificial Sequence: Synthetic Light chain variable region amino acid sequence

SEQ ID NO: 6347 - protein, 14 aa, Artificial Sequence
  Description of Artificial Sequence: Synthetic Light chain variable region CDR L1 amino acid sequence
GSSTGAVTTSNYAN

SEQ ID NO: 6348 - DNA, 42 bp, Artificial Sequence; identical to SEQ ID NO: 204
  Description of Artificial Sequence: Synthetic Light chain variable region CDR L1 nucleic acid sequence

SEQ ID NO: 6349 - protein, 7 aa, Artificial Sequence
  Description of Artificial Sequence: Synthetic Light chain variable region CDR L2 amino acid sequence
GTDKRAP

SEQ ID NO: 6350 - DNA, 21 bp, Artificial Sequence
  Description of Artificial Sequence: Synthetic Light chain variable region CDR L2 nucleic acid sequence
ggcacagacaagcgcgctcct

SEQ ID NO: 6351 - protein, 9 aa, Artificial Sequence
  Description of Artificial Sequence: Synthetic Light chain variable region CDR L3 amino acid sequence
ALWYSNHWV

SEQ ID NO: 6352 - DNA, 27 bp, Artificial Sequence
  Description of Artificial Sequence: Synthetic Light chain variable region CDR L3 nucleic acid sequence
gcgctgtggtacagtaaccattgggtg

SEQ ID NO: 6353 - DNA, 375 bp, Artificial Sequence
  Description of Artificial Sequence: Synthetic Heavy chain variable region nucleic acid sequence
gaggtgcagctgttggggtctgggggaggcttggtacagcctggggggtccctgagactctcctgtgcagcctctggattcacctttgacacatatgccatgaattgggttcgccaggctccagggaaggggctggagtgggtcgcaaggattagatccaagtataacaattacgctacatactacgcagactccgtgaaggatcggttcaccatctccagagacgattccaagagcacgctgtatctgcaaatggaaagcctgagagccgaggacacggcggtgtactactgcgtcaggcacggtaacttcgggaactcgtacgtttcctggtttgctcattggggccaaggaaccctggtcaccgtctcctca

SEQ ID NO: 6354 - protein, 125 aa, Artificial Sequence
  Description of Artificial Sequence: Synthetic Heavy chain variable region amino acid sequence
EVQLLGSGGGLVQPGGSLRLSCAASGFTFDTYAMNWVRQAPGKGLEWVARIRSKYNNYATYYADSVKDRFTISRDDSKSTLYLQMESLRAEDTAVYYCVRHGNFGNSYVSWFAHWGQGTLVTVSS

SEQ ID NO: 6355 - protein, 9 aa, Artificial Sequence
  Description of Artificial Sequence: Synthetic Heavy chain variable region CDR H1 amino acid sequence
FTFDTYAMN

SEQ ID NO: 6356 - DNA, 27 bp, Artificial Sequence
  Description of Artificial Sequence: Synthetic Heavy chain variable region CDR H1 nucleic acid sequence
ttcacctttgacacatatgccatgaat

SEQ ID NO: 6357 - protein, 19 aa, Artificial Sequence
  Description of Artificial Sequence: Synthetic Heavy chain variable region CDR H2 amino acid sequence
RIRSKYNNYATYYADSVKD

SEQ ID NO: 6358 - DNA, 57 bp, Artificial Sequence; identical to SEQ ID NO: 6
  Description of Artificial Sequence: Synthetic Heavy chain variable region CDR H2 nucleic acid sequence

SEQ ID NO: 6359 - protein, 16 aa, Artificial Sequence
  Description of Artificial Sequence: Synthetic Heavy chain variable region CDR H3 amino acid sequence
VRHGNFGNSYVSWFAH

SEQ ID NO: 6360 - DNA, 48 bp, Artificial Sequence
  Description of Artificial Sequence: Synthetic Heavy chain variable region CDR H3 nucleic acid sequence
gtcaggcacggtaacttcgggaactcgtacgtttcctggtttgctcat

SEQ ID NO: 6361 - DNA, 327 bp, Artificial Sequence; identical to SEQ ID NO: 345
  Description of Artificial Sequence: Synthetic Light chain variable region nucleic acid sequence

SEQ ID NO: 6362 - protein, 109 aa, Artificial Sequence; identical to SEQ ID NO: 346
  Description of Artificial Sequence: Synthetic Light chain variable region amino acid sequence

SEQ ID NO: 6363 - protein, 14 aa, Artificial Sequence
  Description of Artificial Sequence: Synthetic Light chain variable region CDR L1 amino acid sequence
GSSTGAVTTSNYAN

SEQ ID NO: 6364 - DNA, 42 bp, Artificial Sequence; identical to SEQ ID NO: 204
  Description of Artificial Sequence: Synthetic Light chain variable region CDR L1 nucleic acid sequence

SEQ ID NO: 6365 - protein, 7 aa, Artificial Sequence
  Description of Artificial Sequence: Synthetic Light chain variable region CDR L2 amino acid sequence
GTDKRAP

SEQ ID NO: 6366 - DNA, 21 bp, Artificial Sequence
  Description of Artificial Sequence: Synthetic Light chain variable region CDR L2 nucleic acid sequence
ggcacagacaagcgcgctcct

SEQ ID NO: 6367 - protein, 9 aa, Artificial Sequence
  Description of Artificial Sequence: Synthetic Light chain variable region CDR L3 amino acid sequence
ALWYSNHWV

SEQ ID NO: 6368 - DNA, 27 bp, Artificial Sequence
  Description of Artificial Sequence: Synthetic Light chain variable region CDR L3 nucleic acid sequence
gcgctgtggtacagtaaccattgggtg

SEQ ID NO: 6369 - DNA, 375 bp, Artificial Sequence
  Description of Artificial Sequence: Synthetic Heavy chain variable region nucleic acid sequence
gaggtgcagctgttggagtctgggggaggcttggtacagcctggggggtccctgagactctcctgtgcagcctctggattcacctttgacacatatgccatgaattgggttcgccaggctccagggaaggggctggagtgggtcgcaaggattagatccaagtataacaattacgctacatactacgcagactccgtgaaggatcggttcaccatctccagagacgattccaagagcacgctgtatctgcaaatggaaagcctgagagccgaggacacggcggtgtactactgcgtcaggcacggtaacttcggtgggggttacgtagcctggtttgctcattggggccaaggaaccctggtcaccgtctcctca

SEQ ID NO: 6370 - protein, 125 aa, Artificial Sequence
  Description of Artificial Sequence: Synthetic Heavy chain variable region amino acid sequence
EVQLLESGGGLVQPGGSLRLSCAASGFTFDTYAMNWVRQAPGKGLEWVARIRSKYNNYATYYADSVKDRFTISRDDSKSTLYLQMESLRAEDTAVYYCVRHGNFGGGYVAWFAHWGQGTLVTVSS

SEQ ID NO: 6371 - protein, 9 aa, Artificial Sequence
  Description of Artificial Sequence: Synthetic Heavy chain variable region CDR H1 amino acid sequence
FTFDTYAMN

SEQ ID NO: 6372 - DNA, 27 bp, Artificial Sequence
  Description of Artificial Sequence: Synthetic Heavy chain variable region CDR H1 nucleic acid sequence
ttcacctttgacacatatgccatgaat

SEQ ID NO: 6373 - protein, 19 aa, Artificial Sequence
  Description of Artificial Sequence: Synthetic Heavy chain variable region CDR H2 amino acid sequence
RIRSKYNNYATYYADSVKD

SEQ ID NO: 6374 - DNA, 57 bp, Artificial Sequence; identical to SEQ ID NO: 6
  Description of Artificial Sequence: Synthetic Heavy chain variable region CDR H2 nucleic acid sequence

SEQ ID NO: 6375 - protein, 16 aa, Artificial Sequence
  Description of Artificial Sequence: Synthetic Heavy chain variable region CDR H3 amino acid sequence
VRHGNFGGGYVAWFAH

SEQ ID NO: 6376 - DNA, 48 bp, Artificial Sequence
  Description of Artificial Sequence: Synthetic Heavy chain variable region CDR H3 nucleic acid sequence
gtcaggcacggtaacttcggtgggggttacgtagcctggtttgctcat

SEQ ID NO: 6377 - DNA, 327 bp, Artificial Sequence; identical to SEQ ID NO: 345
  Description of Artificial Sequence: Synthetic Light chain variable region nucleic acid sequence

SEQ ID NO: 6378 - protein, 109 aa, Artificial Sequence; identical to SEQ ID NO: 346
  Description of Artificial Sequence: Synthetic Light chain variable region amino acid sequence

SEQ ID NO: 6379 - protein, 14 aa, Artificial Sequence
  Description of Artificial Sequence: Synthetic Light chain variable region CDR L1 amino acid sequence
GSSTGAVTTSNYAN

SEQ ID NO: 6380 - DNA, 42 bp, Artificial Sequence; identical to SEQ ID NO: 204
  Description of Artificial Sequence: Synthetic Light chain variable region CDR L1 nucleic acid sequence

SEQ ID NO: 6381 - protein, 7 aa, Artificial Sequence
  Description of Artificial Sequence: Synthetic Light chain variable region CDR L2 amino acid sequence
GTDKRAP

SEQ ID NO: 6382 - DNA, 21 bp, Artificial Sequence
  Description of Artificial Sequence: Synthetic Light chain variable region CDR L2 nucleic acid sequence
ggcacagacaagcgcgctcct

SEQ ID NO: 6383 - protein, 9 aa, Artificial Sequence
  Description of Artificial Sequence: Synthetic Light chain variable region CDR L3 amino acid sequence
ALWYSNHWV

SEQ ID NO: 6384 - DNA, 27 bp, Artificial Sequence
  Description of Artificial Sequence: Synthetic Light chain variable region CDR L3 nucleic acid sequence
gcgctgtggtacagtaaccattgggtg

SEQ ID NO: 6385 - DNA, 375 bp, Artificial Sequence
  Description of Artificial Sequence: Synthetic Heavy chain variable region nucleic acid sequence
gaggtgcagctgttggagtctgggggaggcttggtacagcctggggggtccctgagactctcctgtgcagcctctggattcacctttgacacatatgccatgaattgggttcgccaggctccagggaaggggctggagtgggtcgcaaggattagatccaagtttaacaattacgctacatactacgcagactccgtgaaggatcggttcaccatctccagagacgattccaagagcacgctgtatctgcaaatggaaagcctgagagccgaggacacggcggtgtactactgcgtcaggcacggtaacttccagggtggttacgtatcctggtttgctcattggggccaaggaaccctggtcaccgtctcctca

SEQ ID NO: 6386 - protein, 125 aa, Artificial Sequence
  Description of Artificial Sequence: Synthetic Heavy chain variable region amino acid sequence
EVQLLESGGGLVQPGGSLRLSCAASGFTFDTYAMNWVRQAPGKGLEWVARIRSKFNNYATYYADSVKDRFTISRDDSKSTLYLQMESLRAEDTAVYYCVRHGNFQGGYVSWFAHWGQGTLVTVSS

SEQ ID NO: 6387 - protein, 9 aa, Artificial Sequence
  Description of Artificial Sequence: Synthetic Heavy chain variable region CDR H1 amino acid sequence
FTFDTYAMN

SEQ ID NO: 6388 - DNA, 27 bp, Artificial Sequence
  Description of Artificial Sequence: Synthetic Heavy chain variable region CDR H1 nucleic acid sequence
ttcacctttgacacatatgccatgaat

SEQ ID NO: 6389 - protein, 19 aa, Artificial Sequence
  Description of Artificial Sequence: Synthetic Heavy chain variable region CDR H2 amino acid sequence
RIRSKFNNYATYYADSVKD

SEQ ID NO: 6390 - DNA, 57 bp, Artificial Sequence
  Description of Artificial Sequence: Synthetic Heavy chain variable region CDR H2 nucleic acid sequence
aggattagatccaagtttaacaattacgctacatactacgcagactccgtgaaggat

SEQ ID NO: 6391 - protein, 16 aa, Artificial Sequence
  Description of Artificial Sequence: Synthetic Heavy chain variable region CDR H3 amino acid sequence
VRHGNFQGGYVSWFAH

SEQ ID NO: 6392 - DNA, 48 bp, Artificial Sequence; identical to SEQ ID NO: 1064
  Description of Artificial Sequence: Synthetic Heavy chain variable region CDR H3 nucleic acid sequence

SEQ ID NO: 6393 - DNA, 327 bp, Artificial Sequence; identical to SEQ ID NO: 345
  Description of Artificial Sequence: Synthetic Light chain variable region nucleic acid sequence

SEQ ID NO: 6394 - protein, 109 aa, Artificial Sequence; identical to SEQ ID NO: 346
  Description of Artificial Sequence: Synthetic Light chain variable region amino acid sequence

SEQ ID NO: 6395 - protein, 14 aa, Artificial Sequence
  Description of Artificial Sequence: Synthetic Light chain variable region CDR L1 amino acid sequence
GSSTGAVTTSNYAN

SEQ ID NO: 6396 - DNA, 42 bp, Artificial Sequence; identical to SEQ ID NO: 204
  Description of Artificial Sequence: Synthetic Light chain variable region CDR L1 nucleic acid sequence

SEQ ID NO: 6397 - protein, 7 aa, Artificial Sequence
  Description of Artificial Sequence: Synthetic Light chain variable region CDR L2 amino acid sequence
GTDKRAP

SEQ ID NO: 6398 - DNA, 21 bp, Artificial Sequence
  Description of Artificial Sequence: Synthetic Light chain variable region CDR L2 nucleic acid sequence
ggcacagacaagcgcgctcct

SEQ ID NO: 6399 - protein, 9 aa, Artificial Sequence
  Description of Artificial Sequence: Synthetic Light chain variable region CDR L3 amino acid sequence
ALWYSNHWV

SEQ ID NO: 6400 - DNA, 27 bp, Artificial Sequence
  Description of Artificial Sequence: Synthetic Light chain variable region CDR L3 nucleic acid sequence
gcgctgtggtacagtaaccattgggtg

SEQ ID NO: 6401 - DNA, 375 bp, Artificial Sequence
  Description of Artificial Sequence: Synthetic Heavy chain variable region nucleic acid sequence
gaggtgcagctgttggagtctgggggaggcttggtacagcctggggggtccctgagactctcctgtgcagcctctggattcacctttgacacatatgccatgaattgggttcgccaggctccagggaaggggctggagtgggtcgcaaggattagatccaagtataacaattacgctacatactacgcagactccgtgaaggatcggttcaccatctccagagacgattccaagagcacgctgtatctgcaaatggaaagcctgagagccgaggacacggcggtgtactactgcgtcaggcacggtaacgtggggggtggttacgtatcctggtttgctcattggggccaaggaaccctggtcaccgtctcctca

SEQ ID NO: 6402 - protein, 125 aa, Artificial Sequence
  Description of Artificial Sequence: Synthetic Heavy chain variable region amino acid sequence
EVQLLESGGGLVQPGGSLRLSCAASGFTFDTYAMNWVRQAPGKGLEWVARIRSKYNNYATYYADSVKDRFTISRDDSKSTLYLQMESLRAEDTAVYYCVRHGNVGGGYVSWFAHWGQGTLVTVSS

SEQ ID NO: 6403 - protein, 9 aa, Artificial Sequence
  Description of Artificial Sequence: Synthetic Heavy chain variable region CDR H1 amino acid sequence
FTFDTYAMN

SEQ ID NO: 6404 - DNA, 27 bp, Artificial Sequence
  Description of Artificial Sequence: Synthetic Heavy chain variable region CDR H1 nucleic acid sequence
ttcacctttgacacatatgccatgaat

SEQ ID NO: 6405 - protein, 19 aa, Artificial Sequence
  Description of Artificial Sequence: Synthetic Heavy chain variable region CDR H2 amino acid sequence
RIRSKYNNYATYYADSVKD

SEQ ID NO: 6406 - DNA, 57 bp, Artificial Sequence; identical to SEQ ID NO: 6
  Description of Artificial Sequence: Synthetic Heavy chain variable region CDR H2 nucleic acid sequence

SEQ ID NO: 6407 - protein, 16 aa, Artificial Sequence
  Description of Artificial Sequence: Synthetic Heavy chain variable region CDR H3 amino acid sequence
VRHGNVGGGYVSWFAH

SEQ ID NO: 6408 - DNA, 48 bp, Artificial Sequence; identical to SEQ ID NO: 1416
  Description of Artificial Sequence: Synthetic Heavy chain variable region CDR H3 nucleic acid sequence

SEQ ID NO: 6409 - DNA, 327 bp, Artificial Sequence; identical to SEQ ID NO: 345
  Description of Artificial Sequence: Synthetic Light chain variable region nucleic acid sequence

SEQ ID NO: 6410 - protein, 109 aa, Artificial Sequence; identical to SEQ ID NO: 346
  Description of Artificial Sequence: Synthetic Light chain variable region amino acid sequence

SEQ ID NO: 6411 - protein, 14 aa, Artificial Sequence
  Description of Artificial Sequence: Synthetic Light chain variable region CDR L1 amino acid sequence
GSSTGAVTTSNYAN

SEQ ID NO: 6412 - DNA, 42 bp, Artificial Sequence; identical to SEQ ID NO: 204
  Description of Artificial Sequence: Synthetic Light chain variable region CDR L1 nucleic acid sequence

SEQ ID NO: 6413 - protein, 7 aa, Artificial Sequence
  Description of Artificial Sequence: Synthetic Light chain variable region CDR L2 amino acid sequence
GTDKRAP

SEQ ID NO: 6414 - DNA, 21 bp, Artificial Sequence
  Description of Artificial Sequence: Synthetic Light chain variable region CDR L2 nucleic acid sequence
ggcacagacaagcgcgctcct

SEQ ID NO: 6415 - protein, 9 aa, Artificial Sequence
  Description of Artificial Sequence: Synthetic Light chain variable region CDR L3 amino acid sequence
ALWYSNHWV

SEQ ID NO: 6416 - DNA, 27 bp, Artificial Sequence
  Description of Artificial Sequence: Synthetic Light chain variable region CDR L3 nucleic acid sequence
gcgctgtggtacagtaaccattgggtg

SEQ ID NO: 6417 - DNA, 375 bp, Artificial Sequence
  Description of Artificial Sequence: Synthetic Heavy chain variable region nucleic acid sequence
gaggtgcagctgttggagtctgggggaggcttggtacagcctggggggtccctgagactctcctgtgcagcctctggattcacctttgacacatatgccatgaattgggttcgccaggctccagggaaggggctggagtgggtcgcaaggattagatccaagtataacaattacgctacatactacgcagactccgtgaaggatcggttcaccatctccagagacgattccaagagcacgctgtatctgcaaatggaaagcctgagagccgaggacacggcggtgtactactgcgtcaggcacgataacttcggggctggttacgtatcctggtttgctcattggggccaaggaaccctggtcaccgtctcctca

SEQ ID NO: 6418 - protein, 125 aa, Artificial Sequence; identical to SEQ ID NO: 1122
  Description of Artificial Sequence: Synthetic Heavy chain variable region amino acid sequence

SEQ ID NO: 6419 - protein, 9 aa, Artificial Sequence
  Description of Artificial Sequence: Synthetic Heavy chain variable region CDR H1 amino acid sequence
FTFDTYAMN

SEQ ID NO: 6420 - DNA, 27 bp, Artificial Sequence
  Description of Artificial Sequence: Synthetic Heavy chain variable region CDR H1 nucleic acid sequence
ttcacctttgacacatatgccatgaat

SEQ ID NO: 6421 - protein, 19 aa, Artificial Sequence
  Description of Artificial Sequence: Synthetic Heavy chain variable region CDR H2 amino acid sequence
RIRSKYNNYATYYADSVKD

SEQ ID NO: 6422 - DNA, 57 bp, Artificial Sequence; identical to SEQ ID NO: 6
  Description of Artificial Sequence: Synthetic Heavy chain variable region CDR H2 nucleic acid sequence

SEQ ID NO: 6423 - protein, 16 aa, Artificial Sequence
  Description of Artificial Sequence: Synthetic Heavy chain variable region CDR H3 amino acid sequence
VRHDNFGAGYVSWFAH

SEQ ID NO: 6424 - DNA, 48 bp, Artificial Sequence; identical to SEQ ID NO: 1128
  Description of Artificial Sequence: Synthetic Heavy chain variable region CDR H3 nucleic acid sequence

SEQ ID NO: 6425 - DNA, 327 bp, Artificial Sequence; identical to SEQ ID NO: 345
  Description of Artificial Sequence: Synthetic Light chain variable region nucleic acid sequence

SEQ ID NO: 6426 - protein, 109 aa, Artificial Sequence; identical to SEQ ID NO: 346
  Description of Artificial Sequence: Synthetic Light chain variable region amino acid sequence

SEQ ID NO: 6427 - protein, 14 aa, Artificial Sequence
  Description of Artificial Sequence: Synthetic Light chain variable region CDR L1 amino acid sequence
GSSTGAVTTSNYAN

SEQ ID NO: 6428 - DNA, 42 bp, Artificial Sequence; identical to SEQ ID NO: 204
  Description of Artificial Sequence: Synthetic Light chain variable region CDR L1 nucleic acid sequence

SEQ ID NO: 6429 - protein, 7 aa, Artificial Sequence
  Description of Artificial Sequence: Synthetic Light chain variable region CDR L2 amino acid sequence
GTDKRAP

SEQ ID NO: 6430 - DNA, 21 bp, Artificial Sequence
  Description of Artificial Sequence: Synthetic Light chain variable region CDR L2 nucleic acid sequence
ggcacagacaagcgcgctcct

SEQ ID NO: 6431 - protein, 9 aa, Artificial Sequence
  Description of Artificial Sequence: Synthetic Light chain variable region CDR L3 amino acid sequence
ALWYSNHWV

SEQ ID NO: 6432 - DNA, 27 bp, Artificial Sequence
  Description of Artificial Sequence: Synthetic Light chain variable region CDR L3 nucleic acid sequence
gcgctgtggtacagtaaccattgggtg

SEQ ID NO: 6433 - DNA, 375 bp, Artificial Sequence
  Description of Artificial Sequence: Synthetic Heavy chain variable region nucleic acid sequence
gaggtgcagctgttggagtctgggggaggcttggtacagcctggggggtccctgagactctcctgtgcagcctctggattcacctttgacacatatgccatgaattgggttcgccaggctccagggaaggggctggagtgggtcgcaaggattagatccaagtataacaattacgctacatactacgcagactccgtgaaggatcggttcaccatctccagagacgattccaagagcacgctgtatctgcaaatggaaagcctgagagccgaggacacggcggtgtactactgcgtcaggcacggtaacttcggggttggttacgtatcctggtttgcttcttggggccaaggaaccctggtcaccgtctcctca

SEQ ID NO: 6434 - protein, 125 aa, Artificial Sequence; identical to SEQ ID NO: 1138
  Description of Artificial Sequence: Synthetic Heavy chain variable region amino acid sequence

SEQ ID NO: 6435 - protein, 9 aa, Artificial Sequence
  Description of Artificial Sequence: Synthetic Heavy chain variable region CDR H1 amino acid sequence
FTFDTYAMN

SEQ ID NO: 6436 - DNA, 27 bp, Artificial Sequence
  Description of Artificial Sequence: Synthetic Heavy chain variable region CDR H1 nucleic acid sequence
ttcacctttgacacatatgccatgaat

SEQ ID NO: 6437 - protein, 19 aa, Artificial Sequence
  Description of Artificial Sequence: Synthetic Heavy chain variable region CDR H2 amino acid sequence
RIRSKYNNYATYYADSVKD

SEQ ID NO: 6438 - DNA, 57 bp, Artificial Sequence; identical to SEQ ID NO: 6
  Description of Artificial Sequence: Synthetic Heavy chain variable region CDR H2 nucleic acid sequence

SEQ ID NO: 6439 - protein, 16 aa, Artificial Sequence
  Description of Artificial Sequence: Synthetic Heavy chain variable region CDR H3 amino acid sequence
VRHGNFGVGYVSWFAS

SEQ ID NO: 6440 - DNA, 48 bp, Artificial Sequence; identical to SEQ ID NO: 1144
  Description of Artificial Sequence: Synthetic Heavy chain variable region CDR H3 nucleic acid sequence

SEQ ID NO: 6441 - DNA, 327 bp, Artificial Sequence; identical to SEQ ID NO: 345
  Description of Artificial Sequence: Synthetic Light chain variable region nucleic acid sequence

SEQ ID NO: 6442 - protein, 109 aa, Artificial Sequence; identical to SEQ ID NO: 346
  Description of Artificial Sequence: Synthetic Light chain variable region amino acid sequence

SEQ ID NO: 6443 - protein, 14 aa, Artificial Sequence
  Description of Artificial Sequence: Synthetic Light chain variable region CDR L1 amino acid sequence
GSSTGAVTTSNYAN

SEQ ID NO: 6444 - DNA, 42 bp, Artificial Sequence; identical to SEQ ID NO: 204
  Description of Artificial Sequence: Synthetic Light chain variable region CDR L1 nucleic acid sequence

SEQ ID NO: 6445 - protein, 7 aa, Artificial Sequence
  Description of Artificial Sequence: Synthetic Light chain variable region CDR L2 amino acid sequence
GTDKRAP

SEQ ID NO: 6446 - DNA, 21 bp, Artificial Sequence
  Description of Artificial Sequence: Synthetic Light chain variable region CDR L2 nucleic acid sequence
ggcacagacaagcgcgctcct

SEQ ID NO: 6447 - protein, 9 aa, Artificial Sequence
  Description of Artificial Sequence: Synthetic Light chain variable region CDR L3 amino acid sequence
ALWYSNHWV

SEQ ID NO: 6448 - DNA, 27 bp, Artificial Sequence
  Description of Artificial Sequence: Synthetic Light chain variable region CDR L3 nucleic acid sequence
gcgctgtggtacagtaaccattgggtg

SEQ ID NO: 6449 - DNA, 375 bp, Artificial Sequence
  Description of Artificial Sequence: Synthetic Heavy chain variable region nucleic acid sequence
gaggtgcagctgttggagtctgggggaggcttggtacagcctggggggtccctgagactctcctgtgcagcctctggattcacctttgacacatatgccatgaattgggttcgccaggctccagggaaggggttggagtgggtcgcaaggattagatccaagtataacaattacgctacatactacgcagactccgtgaaggatcggttcaccatctccagagacgattccaagagcacgctgtatctgcaaatggaaagcctgagagccgaggacacggcggtgtactactgcgtcaggcacggtaacttcgggaactatgctgtatcctggtttgctcattggggccaaggaaccctggtcaccgtctcctca

SEQ ID NO: 6450 - protein, 125 aa, Artificial Sequence
  Description of Artificial Sequence: Synthetic Heavy chain variable region amino acid sequence
EVQLLESGGGLVQPGGSLRLSCAASGFTFDTYAMNWVRQAPGKGLEWVARIRSKYNNYATYYADSVKDRFTISRDDSKSTLYLQMESLRAEDTAVYYCVRHGNFGNYAVSWFAHWGQGTLVTVSS

SEQ ID NO: 6451 - protein, 9 aa, Artificial Sequence
  Description of Artificial Sequence: Synthetic Heavy chain variable region CDR H1 amino acid sequence
FTFDTYAMN

SEQ ID NO: 6452 - DNA, 27 bp, Artificial Sequence
  Description of Artificial Sequence: Synthetic Heavy chain variable region CDR H1 nucleic acid sequence
ttcacctttgacacatatgccatgaat

SEQ ID NO: 6453 - protein, 19 aa, Artificial Sequence
  Description of Artificial Sequence: Synthetic Heavy chain variable region CDR H2 amino acid sequence
RIRSKYNNYATYYADSVKD

SEQ ID NO: 6454 - DNA, 57 bp, Artificial Sequence; identical to SEQ ID NO: 6
  Description of Artificial Sequence: Synthetic Heavy chain variable region CDR H2 nucleic acid sequence

SEQ ID NO: 6455 - protein, 16 aa, Artificial Sequence
  Description of Artificial Sequence: Synthetic Heavy chain variable region CDR H3 amino acid sequence
VRHGNFGNYAVSWFAH

SEQ ID NO: 6456 - DNA, 48 bp, Artificial Sequence; identical to SEQ ID NO: 1240
  Description of Artificial Sequence: Synthetic Heavy chain variable region CDR H3 nucleic acid sequence

SEQ ID NO: 6457 - DNA, 327 bp, Artificial Sequence; identical to SEQ ID NO: 345
  Description of Artificial Sequence: Synthetic Light chain variable region nucleic acid sequence

SEQ ID NO: 6458 - protein, 109 aa, Artificial Sequence; identical to SEQ ID NO: 346
  Description of Artificial Sequence: Synthetic Light chain variable region amino acid sequence

SEQ ID NO: 6459 - protein, 14 aa, Artificial Sequence
  Description of Artificial Sequence: Synthetic Light chain variable region CDR L1 amino acid sequence
GSSTGAVTTSNYAN

SEQ ID NO: 6460 - DNA, 42 bp, Artificial Sequence; identical to SEQ ID NO: 204
  Description of Artificial Sequence: Synthetic Light chain variable region CDR L1 nucleic acid sequence

SEQ ID NO: 6461 - protein, 7 aa, Artificial Sequence
  Description of Artificial Sequence: Synthetic Light chain variable region CDR L2 amino acid sequence
GTDKRAP

SEQ ID NO: 6462 - DNA, 21 bp, Artificial Sequence
  Description of Artificial Sequence: Synthetic Light chain variable region CDR L2 nucleic acid sequence
ggcacagacaagcgcgctcct

SEQ ID NO: 6463 - protein, 9 aa, Artificial Sequence
  Description of Artificial Sequence: Synthetic Light chain variable region CDR L3 amino acid sequence
ALWYSNHWV

SEQ ID NO: 6464 - DNA, 27 bp, Artificial Sequence
  Description of Artificial Sequence: Synthetic Light chain variable region CDR L3 nucleic acid sequence
gcgctgtggtacagtaaccattgggtg

SEQ ID NO: 6465 - DNA, 375 bp, Artificial Sequence
  Description of Artificial Sequence: Synthetic Heavy chain variable region nucleic acid sequence
gaggtgcagctgttggagtctgggggaggcttggtacagcctggggggtccctgagactctcctgtgcagcctctggattcacctttgacacatatgccatgaattgggttcgccaggctccagggaaggggctggagtgggtcgcaaggattagatccaagtataacaattacgctacatactacgcagactccgtgaaggatcggttcaccatctccagagacgattccaagagcacgctgtatctgcaaatggaaagcctgagagccgaggacacggcggtgtactactgcgtcaggcacggtagcttcgggaaccatattgtatcctggtttgctcattggggccaaggaaccctggtcaccgtctcctca

SEQ ID NO: 6466 - protein, 125 aa, Artificial Sequence
  Description of Artificial Sequence: Synthetic Heavy chain variable region amino acid sequence
EVQLLESGGGLVQPGGSLRLSCAASGFTFDTYAMNWVRQAPGKGLEWVARIRSKYNNYATYYADSVKDRFTISRDDSKSTLYLQMESLRAEDTAVYYCVRHGSFGNHIVSWFAHWGQGTLVTVSS

SEQ ID NO: 6467 - protein, 9 aa, Artificial Sequence
  Description of Artificial Sequence: Synthetic Heavy chain variable region CDR H1 amino acid sequence
FTFDTYAMN

SEQ ID NO: 6468 - DNA, 27 bp, Artificial Sequence
  Description of Artificial Sequence: Synthetic Heavy chain variable region CDR H1 nucleic acid sequence
ttcacctttgacacatatgccatgaat

SEQ ID NO: 6469 - protein, 19 aa, Artificial Sequence
  Description of Artificial Sequence: Synthetic Heavy chain variable region CDR H2 amino acid sequence
RIRSKYNNYATYYADSVKD

SEQ ID NO: 6470 - DNA, 57 bp, Artificial Sequence; identical to SEQ ID NO: 6
  Description of Artificial Sequence: Synthetic Heavy chain variable region CDR H2 nucleic acid sequence

SEQ ID NO: 6471 - protein, 16 aa, Artificial Sequence
  Description of Artificial Sequence: Synthetic Heavy chain variable region CDR H3 amino acid sequence
VRHGSFGNHIVSWFAH

SEQ ID NO: 6472 - DNA, 48 bp, Artificial Sequence
  Description of Artificial Sequence: Synthetic Heavy chain variable region CDR H3 nucleic acid sequence
gtcaggcacggtagcttcgggaaccatattgtatcctggtttgctcat

SEQ ID NO: 6473 - DNA, 327 bp, Artificial Sequence; identical to SEQ ID NO: 345
  Description of Artificial Sequence: Synthetic Light chain variable region nucleic acid sequence

SEQ ID NO: 6474 - protein, 109 aa, Artificial Sequence; identical to SEQ ID NO: 346
  Description of Artificial Sequence: Synthetic Light chain variable region amino acid sequence

SEQ ID NO: 6475 - protein, 14 aa, Artificial Sequence
  Description of Artificial Sequence: Synthetic Light chain variable region CDR L1 amino acid sequence
GSSTGAVTTSNYAN

SEQ ID NO: 6476 - DNA, 42 bp, Artificial Sequence; identical to SEQ ID NO: 204
  Description of Artificial Sequence: Synthetic Light chain variable region CDR L1 nucleic acid sequence

SEQ ID NO: 6477 - protein, 7 aa, Artificial Sequence
  Description of Artificial Sequence: Synthetic Light chain variable region CDR L2 amino acid sequence
GTDKRAP

SEQ ID NO: 6478 - DNA, 21 bp, Artificial Sequence
  Description of Artificial Sequence: Synthetic Light chain variable region CDR L2 nucleic acid sequence
ggcacagacaagcgcgctcct

SEQ ID NO: 6479 - protein, 9 aa, Artificial Sequence
  Description of Artificial Sequence: Synthetic Light chain variable region CDR L3 amino acid sequence
ALWYSNHWV

SEQ ID NO: 6480 - DNA, 27 bp, Artificial Sequence
  Description of Artificial Sequence: Synthetic Light chain variable region CDR L3 nucleic acid sequence
gcgctgtggtacagtaaccattgggtg

What is claimed is:

1. An antibody or antigen-binding polypeptide comprising a CDRH1 comprising an amino acid sequence of FNIKDYYMH (SEQ ID NO: 6720), YTFTSYTIH (SEQ ID NO: 6721), or FTFX₁TYAMN (SEQ ID NO: 6722), wherein X₁ is any amino acid.

2. The antibody or antigen-binding polypeptide according to claim 1, wherein X₁ is N or D.

3. An antibody or antigen-binding polypeptide comprising a CDRH2 comprising an amino acid sequence of WIDLENX₁NTX₂YDX₃KFOG (SEQ ID NO: 6723), wherein X₁, X₂, and X₃ independently are any amino acid.

4. The antibody or antigen-binding polypeptide according to claim 3, wherein X₁ is not G.

5. The antibody or antigen binding polypeptide of any of claims 3-4, wherein X₂ is V or I.

6. The antibody or antigen binding polypeptide of any of claims 3-5, wherein X₃ is not G.

7. An antibody or antigen-binding polypeptide comprising a CDRH3 comprising an amino acid sequence of X₁QSYSX₂RT (SEQ ID NO: 6724) or X₃RDX₄YGX₅YFYDV (SEQ ID NO: 6725), wherein X₁, X₂, X₃, X₄, and X₅ are independently are any amino acid.

8. The antibody or antigen-binding polypeptide of claim 7, wherein X₁ is K or T.

9. The antibody or antigen-binding polypeptide of claim 7, wherein X₁ is T.

10. The antibody or antigen-binding polypeptide of any of claims 7-9, wherein X₂ is R or L.

11. The antibody or antigen-binding polypeptide of any of claims 7-9, wherein X₃ is A or G.

12. The antibody or antigen-binding polypeptide of any of claim 7-11, wherein X₄ is not G.

13. The antibody or antigen-binding polypeptide of any of claims 7-12, wherein X₅ is R, A, G, or L.

14. An antibody or antigen-binding polypeptide comprising a CDRL1 comprising an amino acid sequence of X₁KSSQX₂LLX₃X₄RTGKX₅YLA (SEQ ID NO: 6726), wherein X₁, X₂, X₃, X₄, and X₅ independently are any amino acid.

15. The antibody or antigen-binding polypeptide according to claim 14, wherein X₁ is K or R.

16. The antibody or antigen-binding polypeptide according to claim 14, wherein X₂ is S or N

17. The antibody or antigen-binding polypeptide according to claim 14, wherein X₃ is E or N.

18. The antibody or antigen-binding polypeptide according to claim 14, wherein X₄ is A or S.

19. The antibody or antigen-binding polypeptide according to claim 14, wherein X₅ is N or S.

20. An antibody or antigen-binding polypeptide comprising a CDRL2 comprising an amino acid sequence of WASTRES (SEQ ID NO: 6727) or GTX₁KRAP (SEQ ID NO: 6728), wherein X₁ is any amino acid.

21. The antibody or antigen-binding polypeptide according to claim 20, wherein X₁ is N or D.

22. An antibody or antigen-binding polypeptide comprising a CDRL3 comprising an amino acid sequence of KQSYSX₁RT (SEQ ID NO: 6729), wherein X₁ is any amino acid.

23. The antibody or antigen-binding polypeptide according to claim 22, wherein X₁ is R.

24. The antibody or antigen binding polypeptide according to claim 22, wherein X₁ is L or I.

25. An antibody or antigen binding polypeptide comprising one or more of a CDRH1 according to any of claims 1-2, a CDRH2 according to any of claims 3-6, and a CDRH3 according to any of claims 7-13.

26. An antibody or antigen-binding polypeptide comprising one or more of a CDRL1 according to any of claims 14-17, a CDRL2 according to any of claims 20-21, and a CDRL3 according to any of claims 22-24.

27. An antibody or antigen-binding polypeptide comprising a CDRH1 according to any of claims 1-2, a CDRH2 according to any of claims 3-6, a CDRH3 according to any of claims 7-13, and a CDRL1 according to any of claims 14-17, a CDRL2 according to any of claims 20-21, and a CDRL3 according to any of claims 22-24.
